(19) United States
(12) Patent Application Publication
(10) Pub. No.: US 2026/0092275 A1
(43) Pub. Date: Apr. 2, 2026

(54) PRODUCTS AND COMPOSITIONS

(71) Applicant: Sirnaomics, Inc., Germantown, MD (US)

(72) Inventor: Dmitry SAMARSKY, Germantown, MD (US)

(21) Appl. No.: 19/082,089

(22) Filed: Mar. 17, 2025

Related U.S. Application Data
(63) Continuation of application No. PCT/US23/74474, filed on Sep. 18, 2023.
(60) Provisional application No. 63/407,462, filed on Sep. 16, 2022.

(51) Int. Cl. C12N 15/113; A61K 39/395; A61K 45/06

(52) U.S. Cl. CPC C12N 15/113; A61K 39/3955; A61K 45/06; C12N 2310/14; C12N 2310/313; C12N 2310/315; C12N 2310/321; C12N 2310/322; C12N 2310/351

(57) ABSTRACT

Nucleic acid products and compositions are provided, together with methods for their use, to modulate, in particular, interfere with or inhibit CFB and C5 gene expression.

### RELATED APPLICATIONS

[0001] This application is a continuation of International Application No. PCT/US23/74474, filed Sep. 18, 2023, which claims the benefit of and priority to U.S. Provisional Application No. 63/407,462, filed Sep. 16, 2022, the contents of each of which are incorporated herein by reference in their entireties.

### SEQUENCE LISTING

[0002] The instant application contains a Sequence Listing which has been submitted electronically in XML format and is hereby incorporated by reference in its entirety. Said XML document, created on Aug. 31, 2023, is named 4690_0079i_SL.xml and is 10,728 bytes in size.

### FIELD

[0003] Nucleic acid products, compositions and related methods of use are provided that modulate, in particular, interfere with or inhibit CFB and C5 gene expression in mammals and are useful to treat, prevent, or ameliorate CFB- and C5-associated disorders.

### BACKGROUND

[0004] The complement system is part of the innate immune system. Compared to the adaptive immune system, it is evolutionary older and conserved across most taxa. Its function includes decorating microbes of potentially pathogenic nature (a process referred to as opsonization) and target them for destruction, which is effected by a macromolecular assembly known as the membrane attachment complex (MAC). Certain components of the complement system, once activated, contribute to chemoattraction and activation of leukocytes.

[0005] Complement activation may be triggered by various factors, which all involve presence of microbes but may also involve components of the adaptive immune system such as Ig including IgM. Three main pathways of complement activation have been recognized and are referred to as classical pathway, alternative pathway and lectin pathway.

[0006] In functional terms, complement activation occurs inherently at a low level (spontaneous cleavage of C3 to yield C3a and C3b) and is reinforced in the presence of microbes via an enzymatic cascade converting inactive forms of enzymes (zymogenes) into their active counterparts. The term “convertase”, such as C3 convertase, is primarily a functional term and may refer to structurally distinct complexes. One type of C3 convertases is a complex of C3b and complement factor B (CFB, Factor B). Once formed, a C3 convertase can convert large amounts of C3 into its cleavage products C3a and C3b within short amount of time. The specific C3 convertase, which is a complex of C3b and Factor B has originally been described in the context of the alternative pathway, but may form also in the context of the other two pathways. Within the alternative pathway, Factor B is also a constituent of C5 convertase, a complex, which converts C5, a more downstream component of the pathway, into its active form. The formation of C5 by C5 convertase, cleaving C5 into C5b and C5a is the initiating event in the late steps of complement activation. Based on C5b, the membrane attack complex (MAC) is formed, which lyses a target membrane by building a pore out of C9 molecules.

### Disease

[0007] Paroxysmal Nocturnal Hemoglobinuria (PNH) is an acquired disorder of hematopoiesis characterized by a somatic mutation in the PIGA gene that prevents or impairs the synthesis of glycosylphosphatidylinosital (GPI) anchors. The deficiency on red blood cells (RBCs) of GPI-anchored proteins, including complement regulators CD55 and CD59 results in chronic intravascular hemolysis with recurrent exacerbations, anemia, smooth muscle cell dystonia, and high risk of thrombosis.

### Treatment

[0008] Eculizumab (C5 inhibitor, SOLIRIS) prevents complement mediated intravascular hemolysis and affords other clinical benefits.

[0009] However, because the RBCs of PNH patients on eculizumab are no longer lysed by complement yet exist with bound C3 fragments (C3-opsonized) they are removed (eliminated) by macrophages, likely via interaction with the complement receptor 3, producing a novel phenomenon called extravascular hemolysis.

[0010] Therefore, there is a need to provide further compounds and treatments having the potential of efficiently reducing the effects of PNH.

### SUMMARY

[0011] According to a first aspect, the disclosed embodiments are directed to a nucleic acid construct containing at least: [0014](a) a first nucleic acid portion that is at least partially complementary to at least a first portion of an RNA. which is transcribed from a CFB gene; [0015](b) a second nucleic acid portion that is at least partially complementary to at least a second portion of an RNA, which is transcribed from a C5 gene; [0016](c) a third nucleic acid portion that is at least partially complementary to the first nucleic acid portion of (a), so as to form a first nucleic acid duplex region therewith; [0017](d) a fourth nucleic acid portion that is at least partially complementary to the second nucleic acid portion of (b), so as to form a second nucleic acid duplex region therewith.

[0012] In particular, the inventors have found out that targeting C5 prevents intravascular hemolysis and targeting CFB prevents extravascular hemolysis at the same time. According to a second aspect, the disclosed embodiments are directed to a composition containing a nucleic acid construct according to the first aspect, and a physiologically acceptable excipient. According to a third aspect, the disclosed embodiments are directed to pharmaceutical composition containing a nucleic acid construct according to the first aspect.

[0013] According to a fourth aspect, the disclosed embodiments are directed to the nucleic acid construct according to the first aspect, for use in human or veterinary medicine or therapy.

[0014] According to a fifth aspect, the disclosed embodiments are directed to a nucleic acid construct according to the first aspect for use in a method of treating, ameliorating and/or preventing a disease or disorder.

[0015] According to a sixth aspect, the disclosed embodiments are directed to a method of treating a disease or disorder containing administration of a nucleic acid construct according to the first aspect, to an individual in need of treatment.

[0016] According to a seventh aspect, the disclosed embodiments are directed to a use of a nucleic acid construct according to the first aspect, for use in research as a gene function analysis tool.

[0017] According to an eighth aspect, the disclosed embodiments are directed to a use of a nucleic acid construct according to the first aspect in the manufacture of a medicament for a treatment of a disease or disorder.

[0018] Advantageous and/or exemplary features of constructs according to the disclosed embodiments are as follows:
[0019] 1) they contain multiple (2 or more) at least partially double-stranded agents capable of triggering RNA interference, tied together into a single nanostructure predominantly through complementary (Watson-Crick) interactions;
[0020] 2) optionally, other (e.g.) covalent bindings may be used to build the constructs and/or add various ligands (e.g., delivery/targeting moieties such as GalNAc and/or other carbohydrates, cholesterol, peptides, or small molecules, optionally attached via linkers);
[0021] 3) the constructs of the disclosed embodiments predominantly comprise chemically modified nucleotides (e.g., 2′F, 2′OMe, LNO, PNA, MOE, BNA, PMO, phosphorothioate, phosphorodithioate, etc.), mostly (but not only) to increase resistance to nucleases;
[0022] 4) the constructs contain “fragile” components (e.g., chemical linkers, unmodified nucleotides, etc.), which allow the constructs to disassemble upon exposure to certain biologic environments (e.g., exposure to extra- and/or intra-cellular fluids); particular examples could be (but not limited): a) cleavage of the oligo backbone by nucleases in the sites with non-modified nucleotides; b) cleavage of the chemical linkage due to the change of pH (e.g., in endosomes);
[0023] 5) disassembly upon exposure to the certain biologic environments releases the active components (e.g., the at least partially double-stranded agents capable of triggering RNA interference) to modulate (up- or down-regulate, advantageously down-regulate) target gene expression in cells/organisms;
[0024] 6) the constructs can be used to modulate, advantageously down-regulate or silence gene expression, to study gene function, or to treat various diseases associated with the target genes to be down-regulated.

### Effects Achieved by the Nucleic Acid Constructs

[0025] As can be seen from the this disclosure, including the examples below, the disclosed nucleic acid constructs, including CFB targeting antisense strands and C5 targeting antisense strands, are capable of reducing CFB and C5 gene expression at the same time in an effective manner. Furthermore, all antisense strands disclosed herein, which are being active against CFB in form of an mxRNA and all antisense strands being active against C5 in form of an mxRNA, as shown in the examples as well, are also active when being part of the muRNA nucleic acid constructs of the disclosed embodiments. This is because, without wishing to be bound by theory, it is believed that all antisense strands, no matter if they are in their mxRNA form or in their muRNA form are processed by the same RISC mechanism. For example, the antisense strands may be released from the muRNA constructs of the disclosed embodiments by dissembling in vivo.

[0026] As a consequence, the nucleic acid constructs according to the disclosed embodiments are capable of addressing the problem with Eculizumab set forth above, according to which RBCs are no longer lysed by complement yet exist with bound C3 fragments (C3-opsonized) they are removed (eliminated) by macrophages, likely via interaction with the complement receptor 3 producing a novel phenomenon called extravascular hemolysis. The nucleic acid constructs of the disclosed embodiments have the potential to be effective in treating PNH, as without being bound by theory, targeting C5 prevents intravascular hemolysis and targeting CFB prevents extravascular hemolysis.

[0027] Furthermore, it was surprisingly found that, in certain embodiments, the mentioned effects are achieved by using oligomeric compounds according to the disclosed embodiments for inhibiting the expression of CFB and C5 genes in the form of muRNA constructs having a reduced length of, e.g., 34 nucleosides compared to conventional siRNA molecules having greater lengths. This can, e.g., make a synthesis of muRNA molecules more cost and production efficient, because less units are needed.

[0028] For certain oligomeric compounds according to the disclosed embodiments, being in the form of muRNA constructs for inhibiting the expression of CFB and C5 genes, it was surprisingly found out that the aforementioned effects can be achieved by using short sense strands within the muRNA having a length of advantageously 14 nucleosides, which is shorter than the length of the sense strands in conventional siRNA molecules.

[0029] The effects and technical advantages achieved by using the novel oligomeric compounds for inhibiting CFB and C5 expression will become apparent in more detail in the detailed description and the examples.

### BRIEF DESCRIPTION OF THE DRAWINGS

[0030] FIG. 1 shows the effect of sequence structure optimization on the reduction in CFB gene expression. See Example 3. sss

[0031] FIG. 2 shows a study design including a timeline with the time points of applying the dose to the non-human primates (NHP) and time points for taking samples, as described in Example 4.

[0032] FIG. 3a shows a mean percent of remaining factor Bb (an established read-out for CFB down-regulation and complement pathway down-regulation) levels in the plasma for a single treatment oligomeric with the novel oligomeric constructs 106-13(4) (SEQ ID No. 1758) and 13(5) (SEQ ID No. 1757), as described in Example 4.

[0033] FIG. 3b shows a mean percent of remaining factor Bb levels in the plasma for a multiple treatment with the novel oligomeric constructs 106-13(4) (SEQ ID No. 1758) and 13(5) (SEQ ID No. 1757), as described in Example 4.

[0034] FIG. 4a shows a mean percent of remaining factor Bb levels in the plasma for groups treated with various doses of the novel oligomeric construct 106-13(4) (SEQ ID No. 1758) in comparison with the control group, as described in Example 4.

[0035] FIG. 4b shows a mean percent of remaining factor Bb levels in the plasma for groups treated with various doses of the novel oligomeric construct 13(5) (SEQ ID No. 1757) in comparison with the control group, as described in Example 4.

[0036] FIG. 5 shows an overview of a study protocol in mice with humanized liver, as described in Example 5.

[0037] FIG. 6 shows CFB knock-down in the mice at the mRNA level of two compounds (106-13(4) (SEQ ID No. 1758) and 13(5) (SEQ ID No. 1757) of the disclosed embodiments as compared to negative control after 2 and 6 weeks, as described in Example 5. sss

[0038] FIG. 7 shows amounts of CFB (“Factor B”) as well as of Factor Bb in plasma of the mice following administration of CFB-targeting compounds (106-13(4) (SEQ ID No. 1758) and 13(5) (SEQ ID No. 1757)), as compared to negative control after 2 and 6 weeks, as described in Example 5.

[0039] FIG. 8 shows single dose curves of certain C5 mxRNA compounds selected from Table 3e (SEQ ID Nos. 1959-2058) of the disclosed embodiments and their activity in inhibiting C5 gene expression (primary screening), as described in Example 7.

[0040] FIG. 9 shows dose curves of 25 C5 mxRNA compounds selected from Table 3e (SEQ ID Nos. 1959-2058) and their activity in inhibiting C5 gene expression (secondary screening), as described in Example 7.

[0041] FIG. 10 shows dose curves of C5 mxRNA lead compounds (C5-30 (SEQ ID No. 1988) and C5-37 (SEQ ID No. 1995)) selected from Table 3e (SEQ ID Nos. 1959-2058) for preparation in vivo and their dose curves, as described in Example 7.

[0042] FIG. 11 shows a study schedule and study information for a study described in Example 8, relating to C5 targeting mxRNA leads for candidate dose and duration response study in humanized liver-uPA-SCID mice (PXB) model.

[0043] FIG. 12 shows the effects of the C5 targeting mxRNA constructs, C5-30 (SEQ ID No. 1988) and C5-37 (SEQ ID NO. 1995) on dose and duration response in humanized liver-uPA-SCID mice (PXB) in the study described in Example 8.

[0044] FIG. 13a shows dose curves of C5 gene knockdown using muRNA constructs selected from Table 4b (SEQ ID Nos. 2067-2074) for preparation in vivo and their dose curves, as described in Example 9.

[0045] FIG. 13b shows dose curves of CFB gene knockdown using muRNA constructs selected from Table 4b (SEQ ID Nos. 2067-2074) for preparation in vivo and their dose curves, as described in Example 9.

[0046] FIG. 14 shows a schedule for a dose response study described in Example 10, evaluating human complement combination (C5 and CFB; muRNA) targeting leads for candidate in humanized liver-uPA-SCID mice model.

[0047] FIG. 15a shows results for CFB gene knockdown from dose response study (Example 10) evaluating human complement combination (C5 and CFB; muRNA) targeting leads (B106-C5-30 and B106-C5-37, SEQ ID Nos. 2067-2068) selected from Table 4b (SEQ ID Nos. 2067-2074) for candidate in humanized liver-uPA-SCID mice model.

[0048] FIG. 15b shows results for C5 gene knockdown from dose response study (Example 10) evaluating human complement combination (C5 and CFB; muRNA) targeting leads (B106-C5-30 and B106-C5-37, SEQ ID Nos. 2067-2068) selected from Table 4b (SEQ ID Nos. 2067-2074) for candidate in humanized liver-uPA-SCID mice model.

[0049] FIG. 16 shows the results of in vivo testing in a humanized mouse model of an advantageous construct of the disclosed embodiments, STP247G, construct B106-C5-30, SEQ ID Nos. 2067-2068. Shown are qPCR data at 2, 4, 8 and 12 weeks, obtained in accordance with Example 11 using a human C5 probe.

[0050] FIG. 17 shows the results of in vivo testing in a humanized mouse model of an advantageous construct of the disclosed embodiments, STP247G, construct B106-C5-30, SEQ ID Nos. 2067-2068. Shown are qPCR data at 2, 4, 8 and 12 weeks, obtained in accordance with Example 11 using a human CFB probe.

### DETAILED DESCRIPTION

[0051] Further embodiments (items) of the disclosed embodiments are described below by way of example only. These examples represent the best ways of putting the disclosed embodiments into practice that are currently known to the applicant although they are not the only ways in which this could be achieved.

[0052] It will be understood that the benefits and advantages described herein may relate to one embodiment or may relate to several embodiments. The embodiments are not limited to those that solve any or all of the stated problems or those that have any or all of the stated benefits and advantages. Embodiments labelled “advantageous” or “advantageously” are not intended to limit the scope of the claims but to show optional disclosed embodiments.

[0053] Features of different aspects and embodiments of the disclosed embodiments may be combined as appropriate, as would be apparent to a skilled person, and may be combined with any of the aspects of the disclosed embodiments.

### Definitions

[0054] The following definitions pertain to the disclosed embodiments throughout. In many instances, the definitions, in addition to the respective definition as such, provide non-exhaustive listings of possible implementations, which amount to certain advantageous embodiments.

[0055] Unless specific definitions are provided, the nomenclature used in connection with, and the procedures and techniques of, analytical chemistry, synthetic organic chemistry, and medicinal and pharmaceutical chemistry described herein are those well-known and commonly used in the art. Standard techniques may be used for chemical synthesis, and chemical analysis. Certain such techniques and procedures may be found for example in “Carbohydrate Modifications in Antisense Research” Edited by Sangvi and Cook, American Chemical Society, Washington D.C., 1994; “Remington's Pharmaceutical Sciences,” Mack Publishing Co., Easton, Pa., 21st edition, 2005; and “Antisense Drug Technology, Principles, Strategies, and Applications” Edited by Stanley T. Crooke, CRC Press, Boca Raton, Florida; and Sambrook et al., “Molecular Cloning, A laboratory Manual,” 2nd Edition, Cold Spring Harbor Laboratory Press, 1989, which are hereby incorporated by reference for any purpose. Where permitted, all patents, applications, published applications and other publications and other data referred to throughout in the disclosure are incorporated by reference herein in their entirety.

[0056] Unless otherwise indicated, the following terms have the following meanings:

[0057] As used herein, “excipient” means any compound or mixture of compounds that is added to a composition as provided herein that is suitable for delivery of an oligomeric compound.

[0058] As used herein, “nucleoside” means a compound containing a nucleobase moiety and a sugar moiety. Nucleosides include, but are not limited to, naturally occurring nucleosides (as found in DNA and RNA) and modified nucleosides. Nucleosides may be linked to a phosphate moiety, phosphate-linked nucleosides also being referred to as “nucleotides”. The structural features and/or the lengths of oligomeric compounds or nucleic acid constructs disclosed herein is expressed in terms of “nucleosides” or “nucleotides”.

[0059] As used herein, “chemical modification” or “chemically modified” means a chemical difference in a compound when compared to a naturally occurring counterpart. Chemical modifications of oligonucleotides include nucleoside modifications (including sugar moiety modifications and nucleobase modifications) and internucleoside linkage modifications. In reference to an oligonucleotide, chemical modification does not include differences only in nucleobase sequence.

[0060] As used herein, “furanosyl” means a structure containing a 5-membered ring containing four carbon atoms and one oxygen atom.

[0061] As used herein, “naturally occurring sugar moiety” means a ribofuranosyl as found in naturally occurring RNA or a deoxyribofuranosyl as found in naturally occurring DNA. A “naturally occurring sugar moiety” as referred to herein is also termed as an “unmodified sugar moiety”. In particular, such a “naturally occurring sugar moiety” or an “unmodified sugar moiety” as referred to herein has a —H (DNA sugar moiety) or —OH (RNA sugar moiety) at the 2′-position of the sugar moiety, especially a —H (DNA sugar moiety) at the 2′-position of the sugar moiety.

[0062] As used herein, “sugar moiety” means a naturally occurring sugar moiety or a modified sugar moiety of a nucleoside. As used herein, “modified sugar moiety,” means a substituted sugar moiety or a sugar surrogate.

[0063] As used herein, “substituted sugar moiety” means a furanosyl that has been substituted. Substituted sugar moieties include, but are not limited to furanosyls containing substituents at the 2′-position, the 3-position, the 5′-position and/or the 4′-position. Certain substituted sugar moieties are bicyclic sugar moieties.

[0064] As used herein, “2′-substituted sugar moiety” means a furanosyl containing a substituent at the 2′-position other than H or OH. Unless otherwise indicated, a 2′-substituted sugar moiety is not a bicyclic sugar moiety (i.e., the 2′-substituent of a 2′-substituted sugar moiety does not form a bridge to another atom of the furanosyl ring).

[0065] As used herein, “MOE” means —OCH2CH2OCH3.

[0066] As used herein, “2′-F nucleoside” refers to a nucleoside containing a sugar containing fluorine at the 2′ position. Unless otherwise indicated, the fluorine in a 2′-F nucleoside is in the ribo position (replacing the OH of a natural ribose). Duplexes of uniformly modified 2′-fluorinated (ribo) oligonucleotides hybridized to RNA strands are not RNase H substrates while the analogs retain RNase H activity.

[0067] As used herein the term “sugar surrogate” means a structure that does not comprise a furanosyl and that is capable of replacing the naturally occurring sugar moiety of a nucleoside, such that the resulting nucleoside sub-units are capable of linking together and/or linking to other nucleosides to form an oligomeric compound, which is capable of hybridizing to a complementary oligomeric compound. Such structures include rings containing a different number of atoms than furanosyl (e.g., 4, 6, or 7-membered rings); replacement of the oxygen of a furanosyl with a non-oxygen atom (e.g., carbon, sulfur, or nitrogen); or both a change in the number of atoms and a replacement of the oxygen. Such structures may also comprise substitutions corresponding to those described for substituted sugar moieties (e.g., 6-membered carbocyclic bicyclic sugar surrogates optionally containing additional substituents). Sugar surrogates also include more complex sugar replacements (e.g., the non-ring systems of peptide nucleic acid). Sugar surrogates include without limitation morpholinos, cyclohexenyls and cyclohexitols.

[0068] As used herein, “bicyclic sugar moiety” means a modified sugar moiety containing a 4 to 7 membered ring (including but not limited to a furanosyl) containing a bridge connecting two atoms of the 4 to 7 membered ring to form a second ring, resulting in a bicyclic structure. In certain embodiments, the 4 to 7 membered ring is a sugar ring. In certain embodiments, the 4 to 7 membered ring is a furanosyl. In certain such embodiments, the bridge connects the 2′-carbon and the 4′-carbon of the furanosyl.

[0069] As used herein, “nucleotide” means a nucleoside further containing a phosphate linking group. As used herein, “linked nucleosides” may or may not be linked by phosphate linkages and thus includes, but is not limited to “linked nucleotides.” As used herein, “linked nucleosides” are nucleosides that are connected in a continuous sequence (i.e., no additional nucleosides are present between those that are linked).

[0070] As used herein, “nucleobase” means a group of atoms that can be linked to a sugar moiety to create a nucleoside that is capable of incorporation into an oligonucleotide, and where the group of atoms is capable of bonding, more specifically hydrogen bonding, with a complementary naturally occurring nucleobase of another oligonucleotide or nucleic acid. Nucleobases may be naturally occurring or may be modified.

[0071] As used herein the terms, “unmodified nucleobase” or “naturally occurring nucleobase” means the naturally occurring heterocyclic nucleobases of RNA or DNA: the purine bases adenine (A) and guanine (G), and the pyrimidine bases thymine (T), cytosine (C) (including 5-methyl C), and uracil (U).

[0072] As used herein, “modified nucleobase,” means any nucleobase that is not a naturally occurring nucleobase.

[0073] As used herein, “modified nucleoside” means a nucleoside containing at least one chemical modification compared to naturally occurring RNA or DNA nucleosides. Modified nucleosides can comprise a modified sugar moiety and/or a modified nucleobase.

[0074] As used herein, “bicyclic nucleoside” or “BNA” means a nucleoside containing a bicyclic sugar moiety.

[0075] As used herein, “locked nucleic acid nucleoside” or “LNA” means a nucleoside containing a bicyclic sugar moiety containing a 4′-CH2-O-2′bridge.

[0076] As used herein, “2′-substituted nucleoside” means a nucleoside containing a substituent at the 2′-position of the sugar moiety other than H or OH. Unless otherwise indicated, a 2′-substituted nucleoside is not a bicyclic nucleoside.

[0077] As used herein, “deoxynucleoside” means a nucleoside containing 2′-H furanosyl sugar moiety, as found in naturally occurring deoxyribonucleosides (DNA). In certain embodiments, a 2′-deoxynucleoside may comprise a modified nucleobase or may comprise an RNA nucleobase (e.g., uracil).

[0078] As used herein, “oligonucleotide” means a compound containing a plurality of linked nucleosides. In certain embodiments, an oligonucleotide contain one or more unmodified ribonucleosides (RNA) and/or unmodified deoxyribonucleosides (DNA) and/or one or more modified nucleosides.

[0079] As used herein, “modified oligonucleotide” means an oligonucleotide containing at least one modified nucleoside and/or at least one modified internucleoside linkage.

[0080] Advantageous modified internucleoside linkages are those, which confer increased stability as compared to the naturally occurring phosphodiesters. “Stability” refers in particular to stability against hydrolysis including enzyme-catalyzed hydrolysis, enzymes including exonucleases and endonucleases.

[0081] Advantageous positions for such modified internucleoside linkages include the termini and the hairpin loop of single-stranded oligomeric compounds of the disclosed embodiments. For example, the internucleoside linkages connecting first and second nucleoside and second and third nucleoside counting from the 5′ terminus, and/or the internucleoside linkages connecting first and second nucleoside and second and third nucleoside counting from the 3′ terminus are modified. In addition, a linkage connecting the terminal nucleoside of the 3′ terminus with a ligand, such as GalNAc, may be modified.

[0082] As discussed above, advantageous positions are in the hairpin loop of the single-stranded oligomeric compounds. In particular, all linkages, all but one linkages or the majority of linkages in the hairpin loop are modified. As used herein, “linkages in the hairpin loop” designates the linkages between nucleosides, which are not engaged in base pairing. For example, in a hairpin loop consisting of five nucleosides, there are four linkages between nucleosides, which are not engaged in base pairing. Advantageously, the term “linkages in the hairpin loop” also extends to the linkages connecting the stem to the loop, i.e., those linkages, which connect a base-paired nucleoside to a non-based paired nucleoside. Generally, there are two such positions in hairpins and mxRNAs in accordance with the disclosed embodiments.

[0083] Most advantageous is that modified internucleoside linkages are at both termini and in the hairpin loop.

[0084] As used herein, “linkage” or “linking group” means a group of atoms that link together two or more other groups of atoms.

[0085] As used herein “internucleoside linkage” means a covalent linkage between adjacent nucleosides in an oligonucleotide.

[0086] As used herein “naturally occurring internucleoside linkage” means a 3′ to 5′ phosphodiester linkage.

[0087] As used herein, “modified internucleoside linkage,” means any internucleoside linkage other than a naturally occurring internucleoside linkage. In particular, a “modified internucleoside linkage” as referred to herein can include a modified phosphorous linking group such as a phosphorothioate or phosphorodithioate internucleoside linkage.

[0088] As used herein, “terminal internucleoside linkage” means the linkage between the last two nucleosides of an oligonucleotide or defined region thereof.

[0089] As used herein, “phosphorus linking group” means a linking group containing a phosphorus atom and can include naturally occurring phosphorous linking groups as present in naturally occurring RNA or DNA, such as phosphodiester linking groups, or modified phosphorous linking groups that are not generally present in naturally occurring RNA or DNA, such as phosphorothioate or phosphorodithioate linking groups. Phosphorus linking groups can therefore include without limitation, phosphodiester, phosphorothioate, phosphorodithioate, phosphonate, methylphosphonate, phosphoramidate, phosphorothioamidate, thionoalkylphosphonate, phosphotriesters, thionoalkylphosphotriester and boranophosphate.

[0090] As used herein, “internucleoside phosphorus linking group” means a phosphorus linking group that directly links two nucleosides.

[0091] As used herein, “oligomeric compound” means a polymeric structure containing two or more substructures. In certain embodiments, an oligomeric compound contain an oligonucleotide, such as a modified oligonucleotide. In certain embodiments, an oligomeric compound further contain one or more conjugate groups and/or terminal groups and/or ligands. In certain embodiments, an oligomeric compound consists of an oligonucleotide. In certain embodiments, an oligomeric compound contain a backbone of one or more linked monomeric sugar moieties, where each linked monomeric sugar moiety is directly or indirectly attached to a heterocyclic base moiety. In certain embodiments, oligomeric compounds may also include monomeric sugar moieties that are not linked to a heterocyclic base moiety, thereby providing abasic sites. Oligomeric compounds may be defined in terms of a nucleobase sequence only, i.e., by specifying the sequence of A, G, C, U (or T). In such a case, the structure of the sugar-phosphate backbone is not particularly limited and may or may not comprise modified sugars and/or modified phosphates. On the other hand, oligomeric compounds may be more comprehensively defined, i.e., by specifying not only the nucleobase sequence, but also the structure of the backbone, in particular the modification status of the sugars (unmodified, 2′-OMe modified, 2′-F modified etc.) and/or of the phosphates. An mxRNA is one non-limiting example for an oligomeric compound.

[0092] As used herein, “nucleic acid construct” or “construct” refers to an assembly of two or more, such as four oligomeric compounds. The oligomeric compounds may be connected to each other by covalent bonds such phosphodiester bonds as they occur in naturally occurring nucleic acids or modified versions thereof as disclosed herein, or by non-covalent bonds such as hydrogen bonds, advantageously hydrogen bonds between nucleobases such as Watson-Crick base pairing. In certain embodiments, advantageous is that a construct contain four oligomeric compounds, two of which are connected covalently, thereby giving rise to two nucleic acid strands, which nucleic acid strands are bound to each other by hydrogen bonds. Complementarity between the strand may be throughout, but is not necessarily so. In particular, exemplary embodiments provide for an antisense strand targeting a first region of the mRNA to be connected covalently with a sense strand of another gene-targeting double stranded RNA molecule, and of the antisense strand of the mRNA-targeting double stranded RNA molecule to be connected covalently to a sense strand of the other mRNA-targeting double stranded RNA molecule. Since antisense and sense strands of the parent single-target-directed RNA molecules do not need to have the same length and advantageously do not have the same length with antisense portions being longer than sense portions, a advantageous construct of the disclosed embodiments contains a central region where the 3′ regions of the antisense portions of the parent single-target-directed RNA molecules face each other. In that region generally no or only partial base pairing will occur, while full complementarity is not excluded. Otherwise, where antisense and sense portions of the respective parent RNA molecules face each other; there is complementarity, advantageously full complementarity or 1 or 2 mismatches. A muRNA is non-limiting example for a nucleic acid construct.

[0093] The term “strand” has its art-established meaning and refers to a plurality of linked nucleosides, the linker not being particularly limited, but including phosphodiesters and variants thereof as disclosed herein. A strand may also be viewed as a plurality of linked nucleotides in which case the linker would be a covalent bond.

[0094] As used herein, “terminal group” means one or more atom attached to either, or both, the 3′ end or the 5′ end, also called “terminus” of an oligonucleotide. In certain embodiments, a terminal group contain one or more terminal group nucleosides, whereas a “terminal nucleoside” is only one nucleotide at the respective end (5′ end or 3′ end).

[0095] As used herein, “conjugate” or “conjugate group” means an atom or group of atoms bound to an oligonucleotide or oligomeric compound. In certain embodiments, a conjugate group links a ligand to a modified oligonucleotide or oligomeric compound. In general, conjugate groups can modify one or more properties of the compound to which they are attached, including, but not limited to pharmacodynamic, pharmacokinetic, binding, absorption, cellular distribution, cellular uptake, charge and/or clearance properties.

[0096] As used herein, “conjugate linker” or “linker” in the context of a conjugate group means a portion of a conjugate group containing any atom or group of atoms and which covalently link an oligonucleotide to another portion of the conjugate group. In certain embodiments, the point of attachment on the oligomeric compound is the 3′-oxygen atom of the 3′-hydroxyl group of the 3′ terminal nucleoside of the oligonucleotide. In certain embodiments, the point of attachment on the oligomeric compound is the 5′-oxygen atom of the 5′-hydroxyl group of the 5′ terminal nucleoside of the oligonucleotide. In certain embodiments, the bond for forming attachment to the oligomeric compound is a cleavable bond. In certain such embodiments, such cleavable bond constitutes all or part of a cleavable moiety.

[0097] In certain embodiments, conjugate groups comprise a cleavable moiety (e.g., a cleavable bond or cleavable nucleoside) and ligand portion that can comprise one or more ligands, such as a carbohydrate cluster portion, such as an N-Acetyl-Galactosamine, also referred to as “GalNAc”, cluster portion. In certain embodiments, the carbohydrate cluster portion is identified by the number and identity of the ligand. For example, in certain embodiments, the carbohydrate cluster portion contain 2 GalNAc groups. For example, in certain embodiments, the carbohydrate cluster portion contain 3 GalNAc groups and this is particularly advantageous. In certain embodiments, the carbohydrate cluster portion contain 4 GalNAc groups. Such ligand portions are attached to an oligomeric compound via a cleavable moiety, such as a cleavable bond or cleavable nucleoside. The ligands can be arranged in a linear or branched configuration, such as a biantennary or triantennary configurations. A advantageous carbohydrate cluster has the following formula:

[chemical structure]

where in the structural formula one, two, or three phosphodiester linkages can also be substituted by phosphorothioate linkages.

[0098] As used herein, “cleavable moiety” means a bond or group that is capable of being cleaved under physiological conditions. In certain embodiments, a cleavable moiety is cleaved inside a cell or sub-cellular compartments, such as an endosome or lysosome. In certain embodiments, a cleavable moiety is cleaved by endogenous enzymes, such as nucleases. In certain embodiments, a cleavable moiety contain a group of atoms having one, two, three, four, or more than four cleavable bonds. In certain embodiments, a cleavable moiety is a phosphodiester linkage.

[0099] As used herein, “cleavable bond” means any chemical bond capable of being broken.

[0100] As used herein, “carbohydrate cluster” means a compound having one or more carbohydrate residues attached to a linker group.

[0101] As used herein, “modified carbohydrate” means any carbohydrate having one or more chemical modifications relative to naturally occurring carbohydrates.

[0102] As used herein, “carbohydrate derivative” means any compound, which may be synthesized using a carbohydrate as a starting material or intermediate.

[0103] As used herein, “carbohydrate” means a naturally occurring carbohydrate, a modified carbohydrate, or a carbohydrate derivative. A carbohydrate is a biomolecule including carbon (C), hydrogen (H) and oxygen (O) atoms. Carbohydrates can include monosaccharide, disaccharides, trisaccharides, tetrasaccharides, oligosaccharides or polysaccharides, such as one or more galactose moieties, one or more lactose moieties, one or more N-Acetyl-Galactosamine moieties, and/or one or more mannose moieties. A particularly advantageous carbohydrate is N-Acetyl-Galactosamine.

[0104] As used herein, “strand” means an oligomeric compound containing linked nucleosides.

[0105] As used herein, “single strand” or “single-stranded” means an oligomeric compound containing linked nucleosides that are connected in a continuous sequence without a break there between. Such single strands may include regions of sufficient self-complementarity so as to be capable of forming a stable self-duplex in a hairpin structure.

[0106] As used herein, “hairpin” means a single stranded oligomeric compound that includes a duplex formed by base pairing between sequences in the strand that are self-complementary and opposite in directionality.

[0107] As used herein, “hairpin loop” means an unpaired loop of linked nucleosides in a hairpin that is created as a result of hybridization of the self-complementary sequences. The resulting structure looks like a loop or a U-shape.

[0108] In particular, short hairpin RNA, also denoted as shRNA, contain a duplex region and a loop connecting the regions forming the duplex. The end of the duplex region, which does not carry the loop, may be blunt-ended or carry (a) 3′ and/or (a) 5′ overhang(s). Advantageously the constructs are blunt-ended constructs. The term “shRNA” is more generic than “mxRNA”, as defined below, and may include compounds in which the loop is not or not exclusively formed out of an antisense strand. In particular, shRNA includes an antisense strand, also called guide strand, being complementary to a region of a target RNA, and a sense strand, i.e., a passenger strand, being substantially complementary to the antisense strand. More particularly, the antisense strand and the sense strand within the shRNA are directly linked, e.g., by a phosphate or a phosphorothioate, or linked by a third portion of linked nucleosides forming the loop, which means that the 3′ end of the antisense strand is linked to the 5′ end of the sense strand via covalent bonding over several other groups. Such direct linkage does not include a gap or nick.

[0109] As used herein, “directionality” means the end-to-end chemical orientation of an oligonucleotide based on the chemical convention of numbering of carbon atoms in the sugar moiety meaning that there will be a 5′-end defined by the 5′ carbon of the sugar moiety, and a 3′-end defined by the 3′ carbon of the sugar moiety. In a duplex or double stranded oligonucleotide, the respective strands run in opposite 5′ to 3′ directions to permit base pairing between them.

[0110] As used herein, “duplex”, or also abbreviated as “dup”, means two or more complementary strand regions, or strands, of an oligonucleotide or oligonucleotides, hybridized together by way of non-covalent, sequence-specific interaction there between. Most commonly, the hybridization in the duplex will be between nucleobases adenine (A) and thymine (T), and/or (A) adenine and uracil (U), and/or guanine (G) and cytosine (C). The duplex may be part of a single stranded structure, where self-complementarity leads to hybridization, or as a result of hybridization between respective strands in a double stranded construct.

[0111] As used herein, “double strand” or “double stranded” means a pair of oligomeric compounds that are hybridized to one another. In certain embodiments, a double-stranded oligomeric compound contain a first and a second oligomeric compound.

[0112] As used herein, “expression” means the process by which a gene ultimately results in a protein. Expression includes, but is not limited to, transcription, post-transcriptional modification (e.g., splicing, polyadenylation, addition of 5′-cap), and translation.

[0113] As used herein, “transcription” or “transcribed” refers to the first of several steps of DNA based gene expression in which a target sequence of DNA is copied into RNA (especially mRNA) by the enzyme RNA polymerase. During transcription, a DNA sequence is read by an RNA polymerase, which produces a complementary, antiparallel RNA sequence called a primary transcript.

[0114] As used herein, “target sequence” means a sequence to which an oligomeric compound is intended to hybridize to result in a desired activity with respect to gene expression. Oligonucleotides have sufficient complementarity to their target sequences to allow hybridization under physiological conditions.

[0115] As used herein, “nucleobase complementarity” or “complementarity” when in reference to nucleobases means a nucleobase that is capable of base pairing with another nucleobase. For example, in DNA, adenine (A) is complementary to thymine (T). For example, in RNA, adenine (A) is complementary to uracil (U). In both DNA and RNA, guanine (G) is complementary to cytosine (C). In certain embodiments, complementary nucleobase means a nucleobase of an oligomeric compound that is capable of base pairing with a nucleobase of its target sequence. For example, if a nucleobase at a certain position of an oligomeric compound is capable of hydrogen bonding with a nucleobase at a certain position of a target sequence, then the position of hydrogen bonding between the oligomeric compound and the target sequence is considered complementary at that nucleobase pair. Nucleobases containing certain modifications may maintain the ability to pair with a counterpart nucleobase and thus, are still capable of nucleobase complementarity.

[0116] As used herein, “non-complementary” in reference to nucleobases means a pair of nucleobases that do not form hydrogen bonds with one another.

[0117] As used herein, “complementary” in reference to oligomeric compounds (e.g., linked nucleosides, oligonucleotides) means the capacity of such oligomeric compounds or regions thereof to hybridize to a target sequence, or to a region of the oligomeric compound itself, through nucleobase complementarity.

[0118] Complementary oligomeric compounds need not have nucleobase complementarity at each nucleoside. Rather, some mismatches are tolerated. In certain embodiments, complementary oligomeric compounds or regions are complementary at 70% of the nucleobases (70% complementary). In certain embodiments, complementary oligomeric compounds or regions are 80%>complementary. In certain embodiments, complementary oligomeric compounds or regions are 90%>complementary. In certain embodiments, complementary oligomeric compounds or regions are at least 95% complementary. In certain embodiments, complementary oligomeric compounds or regions are 100% complementary.

[0119] As used herein, “self-complementarity” in reference to oligomeric compounds means a compound that may fold back on itself, creating a duplex as a result of nucleobase hybridization of internal complementary strand regions. Depending on how close together and/or how long the strand regions are, then the compound may form hairpin loops, junctions, bulges or internal loops.

[0120] As used herein, “mismatch” means a nucleobase of an oligomeric compound that is not capable of pairing with a nucleobase at a corresponding position of a target sequence, or at a corresponding position of the oligomeric compound itself when the oligomeric compound hybridizes as a result of self-complementarity, when the oligomeric compound and the target sequence and/or self-complementary regions of the oligomeric compound, are aligned.

[0121] As used herein, “hybridization” means the pairing of complementary oligomeric compounds (e.g., an oligomeric compound and its target sequence). While not limited to a particular mechanism, the most common mechanism of pairing involves hydrogen bonding, which may be Watson-Crick, Hoogsteen or reversed Hoogsteen hydrogen bonding, between complementary nucleobases.

[0122] As used herein, “specifically hybridizes” means the ability of an oligomeric compound to hybridize to one nucleic acid site with greater affinity than it hybridizes to another nucleic acid site.

[0123] As used herein, “fully complementary” in reference to an oligomeric compound or region thereof means that each nucleobase of the oligomeric compound or region thereof is capable of pairing with a nucleobase of a complementary nucleic acid target sequence or a self-complementary region of the oligomeric compound. Thus, a fully complementary oligomeric compound or region thereof contain no mismatches or unhybridized nucleobases with respect to its target sequence or a self-complementary region of the oligomeric compound.

[0124] As used herein, “percent complementarity” means the percentage of nucleobases of an oligomeric compound that are complementary to an equal-length portion of a target nucleic acid. Percent complementarity is calculated by dividing the number of nucleobases of the oligomeric compound that are complementary to nucleobases at corresponding positions in the target nucleic acid by the total length of the oligomeric compound.

[0125] As used herein, “percent identity” means the number of nucleobases in a first nucleic acid that are the same type (independent of chemical modification) as nucleobases at corresponding positions in a second nucleic acid, divided by the total number of nucleobases in the first nucleic acid.

[0126] As used herein, “modulation” means a change of amount or quality of a molecule, function, or activity when compared to the amount or quality of a molecule, function, or activity prior to modulation. For example, modulation includes the change, either an increase (stimulation or induction) or a decrease (inhibition or reduction) in gene expression.

[0127] As used herein, “type of modification” in reference to a nucleoside or a nucleoside of a “type” means the chemical modification of a nucleoside and includes modified and unmodified nucleosides. Accordingly, unless otherwise indicated, a “nucleoside having a modification of a first type” may be an unmodified nucleoside.

[0128] As used herein, “differently modified” mean chemical modifications or chemical substituents that are different from one another, including absence of modifications. Thus, for example, a MOE nucleoside and an unmodified naturally occurring RNA nucleoside are “differently modified,” even though the naturally occurring nucleoside is unmodified. Likewise, DNA and RNA oligonucleotides are “differently modified,” even though both are naturally occurring unmodified nucleosides. Nucleosides that are the same but for containing different nucleobases are not differently modified. For example, a nucleoside containing a 2′-OMe modified sugar moiety and an unmodified adenine nucleobase and a nucleoside containing a 2′-OMe modified sugar moiety and an unmodified thymine nucleobase are not differently modified.

[0129] As used herein, “the same type of modifications” refers to modifications that are the same as one another, including absence of modifications. Thus, for example, two unmodified RNA nucleosides have “the same type of modification,” even though the RNA nucleosides are unmodified. Such nucleosides having the same type modification may comprise different nucleobases.

[0130] As used herein, “region” or “regions”, or “portion” or “portions”, mean a plurality of linked nucleosides that have a function or character as defined herein, in particular with reference to the claims and definitions as provided herein. Typically, such regions or portions comprise at least 10, at least 11, at least 12 or at least 13 linked nucleosides. For example, such regions can comprise 13 to 20 linked nucleosides, such as 13 to 16 or 18 to 20 linked nucleosides. Typically a first region as defined herein consists essentially of 18 to 20 nucleosides and a second region as defined herein consists essentially of 13 to 16 linked nucleosides.

[0131] As used herein, “pharmaceutically acceptable carrier or diluent” means any substance suitable for use in administering to an animal. In certain embodiments, a pharmaceutically acceptable carrier or diluent is sterile saline. In certain embodiments, such sterile saline is pharmaceutical grade saline.

[0132] As used herein, “substituent” and “substituent group,” means an atom or group that replaces the atom or group of a named parent compound. For example, a substituent of a modified nucleoside is any atom or group that differs from the atom or group found in a naturally occurring nucleoside (e.g., a modified 2′-substituent is any atom or group at the 2′-position of a nucleoside other than H or OH). Substituent groups can be protected or unprotected. In certain embodiments, compounds of the present disclosure have substituents at one or at more than one position of the parent compound. Substituents may also be further substituted with other substituent groups and may be attached directly or via a linking group such as oxygen or an alkyl or hydrocarbyl group to a parent compound.

[0133] Such substituents can be present as the modification on the sugar moiety, in particular a substituent present at the 2′-position of the sugar moiety. Unless otherwise indicated, groups amenable for use as substituents include without limitation, one or more of halo, hydroxyl, alkyl, alkenyl, alkynyl, acyl, carboxyl, alkoxy, alkoxyalkylene and amino substituents. Certain substituents as described herein can represent modifications directly attached to a ring of a sugar moiety (such as a halo, such as fluoro, directly attached to a sugar ring), or a modification indirectly linked to a ring of a sugar moiety by way of an oxygen linking atom that itself is directly linked to the sugar moiety (such as an alkoxyalkylene, such as methoxyethylene, linked to an oxygen atom, overall providing an MOE substituent as described herein attached to the 2′-position of the sugar moiety).

[0134] As used herein, “alkyl,” as used herein, means a saturated straight or branched monovalent C1-6 hydrocarbon radical, with methyl being a most advantageous alkyl as a substituent at the 2′-position of the sugar moiety. The alkyl group typically attaches to an oxygen linking atom at the 2′poisition of the sugar, therefore, overall providing a —Oalkyl substituent, such as an —OCH3 substituent, on a sugar moiety of an oligomeric compound according to the disclosed embodiments. This will be well understood be a person skilled in the art.

[0135] As used herein, “alkylene” means a saturated straight or branched divalent hydrocarbon radical of the general formula —CnH2n- where n is 1-6. Methylene or ethylene are advantageous alkylenes.

[0136] As used herein, “alkenyl” means a straight or branched unsaturated monovalent C2-6 hydrocarbon radical, with ethenyl or propenyl being most advantageous alkenyls as a substituent at the 2′-position of the sugar moiety. As will be well understood in the art, the degree of unsaturation that is present in an alkenyl radical is the presence of at least one carbon to carbon double bond. The alkenyl group typically attaches to an oxygen linking atom at the 2′-position of the sugar, therefore, overall providing a —Oalkenyl substituent, such as an —OCH2CH═CH2 substituent, on a sugar moiety of an oligomeric compound according to the disclosed embodiments. This will be well understood be a person skilled in the art.

[0137] As used herein, “alkynyl” means a straight or branched unsaturated C2-6 hydrocarbon radical, with ethynyl being a most advantageous alkynyl as a substituent at the 2′-position of the sugar moiety. As will be well understood in the art, the degree of unsaturation that is present in an alkynyl radical is the presence of at least one carbon to carbon triple bond. The alkynyl group typically attaches to an oxygen linking atom at the 2′-position of the sugar, therefore, overall providing a —Oalkynyl substituent on a sugar moiety of an oligomeric compound according to the disclosed embodiments. This will be well understood be a person skilled in the art.

[0138] As used herein, “carboxyl” is a radical having a general formula —CO2H.

[0139] As used herein, “acyl” means a radical formed by removal of a hydroxyl group from a carboxyl radical as defined herein and has the general Formula —C(O)—X where X is typically C1-6 alkyl.

[0140] As used herein, “alkoxy” means a radical formed between an alkyl group, such as a C1-6 alkyl group, and an oxygen atom where the oxygen atom is used to attach the alkoxy group either to a parent molecule (such as at the 2′-position of a sugar moiety), or to another group such as an alkylene group as defined herein. Examples of alkoxy groups include without limitation, methoxy, ethoxy, propoxy, isopropoxy, n-butoxy, sec-butoxy and tert-butoxy. Alkoxy groups as used herein may optionally include further substituent groups.

[0141] As used herein, alkoxyalkylene means an alkoxy group as defined herein that is attached to an alkylene group also as defined herein, and where the oxygen atom of the alkoxy group attaches to the alkylene group and the alkylene attaches to a parent molecule. The alkylene group typically attaches to an oxygen linking atom at the 2′-position of the sugar, therefore, overall providing a —Oalkylenealkoxy substituent, such as an —OCH2CH2OCH3 substituent, on a sugar moiety of an oligomeric compound according to the disclosed embodiments. This will be well understood by a person skilled in the art and is generally referred to as an MOE substituent as defined herein and as known in the art.

[0142] As used herein, “amino” includes primary, secondary and tertiary amino groups.

[0143] As used herein, “halo” and “halogen,” mean an atom selected from fluorine, chlorine, bromine and iodine.

[0144] As used herein, the term “mxRNA” is in particular understood as defined in WO 2020/044186 A2, which is incorporated by reference herein in its entirety. In particular, an mxRNA is a hairpin-shaped RNA molecule consisting of an antisense portion (also referred to as the guide strand) and a sense portion (also referred to the passenger strand). The mxRNA contain duplex region and a hairpin loop, where the mxRNA has an approximate length of about 34 nucleotides. The duplex region contain a region in which parts of the antisense portion and substantially the entire sense portion, typically 14 or 15 nucleotides of each strand, are base-paired. The hairpin loop connects both regions, i.e., antisense region and sense region, of that duplex via, e.g., a phosphate or a phosphorothioate linker, i.e., covalently, while the antisense portion typically has a length of about 18 to 20 nucleotides and, therefore, forms the antisense duplex region and the loop. The loop, of which the antisense portion is part, furthermore connects the sense, forming the second strand of the loop, and the antisense portion.

[0145] As used herein, the term “factor Bb” denotes the corresponding and commonly known protein, which binds to C3b within the C3 convertase within complement activation. Factor Bb is an active subunit of CFB and can be produced by a cleavage of CFB into factors Ba and Bb due to factor D, for example in the alternative pathway of the complement activation, after CFB is bound to C3b. The factor Bb level can, such as in the examples of the disclosed embodiments, be used as an indicator for the success of a silencing of CFB expression.

[0146] As used herein, the term “complement component C5” or just “C5” denotes the corresponding and commonly known protein, which decomposes into C5a and C5b, where C5b forms part of the membrane attack complex at the late stage of the complement activation. C5 is a protein that is in humans encoded by the C5 gene. Complement component C5 is the fifth component of complement, which plays an important role in inflammatory and cell killing processes. This protein is composed of alpha and beta polypeptide chains that are linked by a disulfide bridge. An activation peptide, C5a, which is an anaphylatoxin that possesses potent spasmogenic and chemotactic activity, is derived from the alpha polypeptide via cleavage with a C5-convertase. The C5b macromolecular cleavage product can form a complex with the C6 complement component, and this complex is the basis for formation of the membrane attack complex, which includes additional complement components.

[0147] As used herein, the term “muRNA” or “multi RNA” includes nucleic acid constructs containing more than one, typically two, RNA sequences, i.e., first and second nucleic acid portions, targeting different regions of the mRNA; or one region of the mRNA and an mRNA region of another target molecule. The targeting RNA sequences are also referred to as “antisense” or “guide” strands, while the respective passenger strands, i.e., third and fourth nucleic acid portions being complementary to the first and second portion, respectively, are also included in the nucleic acid construct. In particular, such muRNA are designed such that subsequent to in vivo administration, they are disassembled and the first and second nucleic acid portions are released. A particular example for such muRNA is shown below, where (1) is the first nucleic acid portion, (2) is the third nucleic acid portion being complementary to (1), (3) is the second nucleic acid portion being complementary to the fourth nucleic acid portion, while (5) is a labile linker while (6) is a ligand, which will both be explained below.

[chemical structure]

[0148] It will also be understood that oligomeric compounds as described herein may have one or more non-hybridizing nucleosides at one or both ends of one or both strands (overhangs) and/or one or more internal non-hybridizing nucleosides (mismatches) provided there is sufficient complementarity to maintain hybridization under physiologically relevant conditions. Alternatively, oligomeric compounds as described herein may be blunt ended at least one end.

[0149] The term “containing” is used herein to mean including the method steps or elements identified, but that such steps or elements do not comprise an exclusive list and as such, there may be present additional steps or elements.

[0150] Further, to the extent that the term “includes” is used in either the detailed description or the claims, such term is intended to be inclusive in a manner similar to the term “containing” as “containing” is interpreted when employed as a transitional word in a claim.

[0151] The disclosed embodiments relate to the following aspects and embodiments

muRNA Nucleic Acid Constructs

[0152] According to a first aspect, the disclosed embodiments are directed to a nucleic acid construct containing at least:
[0153] (a) a first nucleic acid portion that is at least partially complementary to at least a first portion of an RNA, which is transcribed from a CFB gene;
[0154] (b) a second nucleic acid portion that is at least partially complementary to at least a second portion of an RNA, which is transcribed from a C5 gene;
[0155] (c) a third nucleic acid portion that is at least partially complementary to the first nucleic acid portion of (a), so as to form a first nucleic acid duplex region therewith;
[0156] (d) a fourth nucleic acid portion that is at least partially complementary to the second nucleic acid portion of (b), so as to form a second nucleic acid duplex region therewith.

[0157] The construct may be designed such that subsequent to in vivo administration the construct disassembles to yield at least first and second discrete nucleic acid targeting molecules that respectively target the RNA portions transcribed from the target genes of (a) and (b);

[0158] whereby (i) the first nucleic acid targeting molecule is capable of modulating expression of the target gene of (a), and contain, or is derived from, at least the first nucleic acid portion of (a), and (ii) the second nucleic acid targeting molecule is capable of modulating expression of the target gene of (b), and contain, or is derived from, the second nucleic acid portion of (b).

[0159] The construct may be designed to disassemble such that the first and second discrete nucleic acid targeting molecules are respectively processed by independent RNAi-induced silencing complexes.

### Sequence Features, Labile Functionality and Structural Features of the RNA Molecules

[0160] The construct according to the first aspect and its aforementioned embodiments may at least comprise one labile functionality such that subsequent to in vivo administration the construct is cleaved so as to yield the at least first and second discrete nucleic acid targeting molecules.

[0161] The labile functionality may comprise one or more unmodified nucleotides. In particular the one or more unmodified nucleotides of the labile functionality represent one or more cleavage positions within the construct whereby subsequent to in vivo administration the construct is cleaved at the one or more cleavage positions so as to yield the at least first and second discrete nucleic acid targeting molecules. Especially, the cleavage positions may be respectively located within the construct so that subsequent to cleavage the first discrete nucleic acid targeting molecule contain, or is derived from, the first nucleic acid duplex region, and the second discrete nucleic acid targeting molecule contain, or is derived from, the second nucleic acid duplex region. Advantageously, the first discrete nucleic acid targeting molecule contain or consists of the first nucleic acid portion of (a) and the third nucleic acid portion of (c), and/or the second discrete nucleic acid targeting molecule contain or consists of the second nucleic acid portion of (b) and the fourth nucleic acid portion of (d).

[0162] In certain embodiments
[0163] (a) the first nucleic acid portion has a nucleobase sequence selected from Table 1a (SEQ ID Nos. 1-252);
[0164] (b) the second nucleic acid portion has a nucleobase sequence selected from Table 1c (SEQ ID Nos. 505-754);
[0165] (c) the third nucleic acid portion has a nucleobase sequence selected from Table 1b (SEQ ID Nos. 253-504); and/or
[0166] (d) the fourth nucleic acid portion has a nucleobase sequence selected from Table 1d (SEQ ID NOs: 755-1004).
[0167] where the third and fourth nucleobase sequences, to the extent they have a length of 14 nucleobases, may be shorter by one, two or three nucleobases, where advantageously the 5-terminal nucleobase(s) is/are absent. The compounds, which have been shown to be active as single molecules in the CFB inhibition and the C5 inhibition according to the examples disclosed herein are also plausibly active when used within a degradable nucleic acid construct according to the disclosed embodiments. This is because, without wishing to be bound by a particular theory, that the CFB and C5 antisense strands, after decomposition of the nucleic acid construct, are proceed by the same RISC mechanism as if they would be used in the form of single-stranded mxRNA molecules, which are demonstrated to be highly active in the respective CFB and C5 knock down herein (see examples).

[0168] In certain such embodiments, the first nucleic acid portion of (a) may be directly or indirectly linked to the fourth nucleic acid portion of (d) as a primary structure.

[0169] In certain embodiments, the first and the fourth nucleic acid portions have the nucleobase sequences of SEQ ID NOs: 13 and 784, 13 and 791, 106 and 784, 106 and 791 and where the sequences of SEQ ID NOs 784 and 791 may be shorter by one, two, three or four nucleobases, where advantageously the 5-terminal nucleobase(s) is/are absent.

[0170] In certain embodiments, the second nucleic acid portion of (b) may be directly or indirectly linked to the third nucleic acid portion of (c) as a primary structure.

[0171] In certain embodiments, the second and third nucleic acid portions have the nucleobase sequences of SEQ ID NOs: 534 and 265, 534 and 358, 541 and 265, 541 and 358, advantageously 534 and 358 and/or 541 and 265; and where the sequences of SEQ ID NOs: 265 and 358: may be shorter by one, two, three or four nucleobases, where advantageously the 5-terminal nucleobase(s) is/are absent.

[0172] In certain embodiments, the construct may further comprise 1 to 8 additional nucleic acid portions that are respectively at least partially complementary to an additional 1 to 8 portions of RNA transcribed from one or more target genes, which target genes may be the same or different to each other, and/or the same or different to the target genes defined in (a) and/or (b), and where each of the 1 to 8 additional nucleic acid portions respectively form additional duplex regions with respective passenger nucleic acid portions that are respectively at least partially complementary therewith. In particular, the second nucleic acid portion of (b), and the 1 to 8 additional nucleic acid portions, may be directly or indirectly linked to selected passenger nucleic acid portions as respective primary structures.

[0173] In certain embodiments the direct or indirect linking may represent either (i) an internucleotide bond, (ii) an internucleotide nick, or (iii) a nucleic acid linker portion of 1, 2, 3, 4, 5, 6, 7, 8, 9, or 10 nucleotides, the nucleic acid linker advantageously being single stranded. Advantageously, the linking may be direct, thereby giving rise to (a) contiguous strand(s).

[0174] In certain embodiments, there may exist some complementarity between the first nucleic acid portion of (a) and the second nucleic acid portion of (b), or the third nucleic acid portion of (c) and the fourth nucleic acid portion of (d). Advantageously the complementarity
[0175] (i) may be 1, 2, 3, 4, 5, 6, 7, 8, 9, or 10, advantageously 2, 3, 4 or 5 base pairs; and/or
[0176] (ii) may be between the first nucleic acid portion of (a) and the second nucleic acid portion of (b).

[0177] In certain embodiments, the internucleotide bond may involve at least one of the one or more unmodified nucleotides, where advantageously cleavage may occur at the 3′ position of (at least one of) the unmodified nucleotide(s).

[0178] In certain embodiments, the first nucleic acid portion of (a), and/or the second nucleic acid portion of (b), and/or the third nucleic acid portion of (c), and/or the fourth nucleic acid portion of (d), may be respectively 7 to 25 nucleotides in length. Optionally, the first nucleic acid portion of (a) and/or the second nucleic acid portion of (b) may have a length of 18 to 21, more advantageously 18 to 20, and yet more advantageously 19 nucleotides. In advantageous embodiments, the first nucleic acid portion of (a) and the second nucleic acid portion of (b) have a length of 19 nucleotides. It may be further advantageous that the third nucleic acid portion of (c), and/or the fourth nucleic acid portion of (d) have a length of 11 to 20, more advantageously 13 to 16, and yet more advantageously 14 or 15, most advantageously 14 nucleotides.

[0179] In certain embodiments, the first nucleic portion of (a) and the second nucleic acid portion of (b) may have a length of 19 nucleotides and the third nucleic acid portion of (c) as well as the fourth nucleic acid portion of (b) may have a length of 14 nucleotides.

[0180] In certain embodiments, the unmodified nucleotide(s) is/are at any of position 18 to 25, more advantageously at any of positions 18 to 21, and/or the 3′ terminal position of the first nucleic acid portion of (a) and/or of the third nucleic acid portion of (c).

[0181] In certain embodiments, where the unmodified nucleotide is at position 19.

[0182] In certain embodiments, the first nucleic portion of (a) and the second nucleic acid portion of (b) may have a length of 19 nucleotides and the third nucleic acid portion of (c) as well as the fourth nucleic acid portion of (b) may have a length of 14 nucleotides and the unmodified nucleoside is at position 19 of the first nucleic acid portion of (a) and the second nucleic acid portion of (b).

[0183] In certain embodiments, the nucleic acid linker portion may be 1 to 8 nucleotides in length, advantageously 2 to 7 or 3 to 6 nucleotides in length, more advantageously about 4 or 5 and most advantageously 4 nucleotides in length.

[0184] In certain embodiments, one, more of all of the duplex regions independently may have a length of 10 to 19, more advantageously 13 to 19, and yet more advantageously 13, 14 or 15 base pairs, most advantageously 14 base pairs, where optionally there is one mismatch within the duplex region.

[0185] In certain embodiments, the nucleic acid construct may be blunt ended.

[0186] In certain embodiments,
[0187] the first nucleic acid portion of (a); and/or
[0188] the second nucleic acid portion of (b); and/or
[0189] the third nucleic acid portion of (c); and/or
[0190] the fourth nucleic acid portion of (d); and/or
[0191] to the extent present, the 1 to 8 additional nucleic acid portions as defined previously herein; and/or
[0192] to the extent present, the passenger nucleic acid portions as defined previously herein;
[0193] may have an overhang.

[0194] In certain embodiments, the target RNA may be an mRNA or another RNA molecule.

[0195] The construct of any one of the preceding claims, where
[0196] (a) the first nucleic acid portion is selected from the first 19 nucleotides of the sequences shown in Table 3a, or in Table 3b (SEQ ID Nos. 1505-1758), or is represented by the nucleic acid sequence: 5′[phos] mU #fU #mG fA mA fU mG fA mA fA mC fG mA fC mU #fU #mC #fU #rC (SEQ ID NO: 2075); or
[0197] 5′[phos] mU #fU #mG fC mC fA mC fA mG fA mC fU mC fA mG fA #mG #mA #rG (SEQ ID NO: 2076);
[0198] (b) the second nucleic acid portion is selected from Table 3c or is represented by the nucleic acid sequence 5′[phos] mG #fA #mU fA mG fU mU fG mU fA mA fA mC fA mG #fU #fU #fC #rC (SEQ ID NO: 2077); or
[0199] 5′[phos] mU #fU #mA fC mA fA mC fA mG fA mA fU mA fU mG #fG #mU #fA #rU (SEQ ID NO: 2078);
[0200] (c) the fourth nucleic acid portion is selected from Table 3d or is represented by the nucleic acid sequence: fC #mU #fG mU fU mU fA mC fA mA fC mU mA #mU #mC #[3XGalNAc](SEQ ID NO: 2079); or
[0201] fC #mA #fU mA fU mU fC mU fG mU fU mG mU #mA #mA #[3XGalNAc](SEQ ID NO: 2090 ####); and/or
[0202] (d) the third nucleic acid portion is selected from the sequences consisting of the last 15 nucleotides of the sequences shown in Table 3a (SEQ ID Nos. 1505-1756), the last 14 nucleotides of the first entry of Table 3b (SEQ ID No. 1757), or the last 11 nucleotides of the second entry of Table 3b (SEQ ID No. 1758), or is represented by the nucleic acid sequence: fC mU fG mA fG mU fC mU fG mU fG mG mC #mA #mA #[3XGalNAc](SEQ ID NO: 2080); or
[0203] fC mU fG mA fG mU fC mU fG mU fG mG mC #mA #mA #(SEQ ID NO: 2081).

[0204] In certain embodiment, the construct contain two strands, where the nucleobase sequence of the first strand is shown in Construct ID NO: B106-C5-30, B106-C5-37, B13-C5-30, or B13-C5-37 of Table 4a, advantageously Table 4b, and the nucleobase sequence of the second strand is shown in corresponding Construct ID NO: B106-C5-30, B106-C5-37, B13-C5-30, or B13-C5-37 of Table 4a, advantageously Table 4b. In particular this means that the constructs can comprise or consist of both strands of B106-C5-30, B13-C5-30, B106-C5-37 or B106-C30 shown in Table 4a, advantageously in Table 4b.

[0205] Advantageously, the first strand is shown below:

(SEQ ID NO: 2082)
5′[phos]mU# fU# mG fA mA fU mG fA mA fA mC
fG mA fC mU# fU# mC# fU# rC fC# mU# fG mU
fU mU fA mC fA nA fC mU mA# mU# mC#
[3XGalNAC];
(SEQ ID NO: 2083)
5′[phos]mU# fU# mG fA mA fU mG fA mA fA mC
fG mA fC mU# fU# mC# fU# rC fC# mA# fU mA
fU mU fC mU fG mU fU mG mU# mA# mA#
[3XGalNAc];
(SEQ ID NO: 2084)
5′[phos]mU# fU# mG fC mC fA mC fA mG fA mC
fU mC fA mG fA# mG# mA# rG fC# mU# fG mU
fU mU fA mC fA mA fC mU mA# mU# mC#
[3XGalNAc];
or
(SEQ ID NO: 2085)
5′[phos]mU# fU# mG fC mC fA mC fA mG fA mC
fU mC fA mG fA# mG# mA# rG fC# mA# fU mA
fU mU fC mU fG mU fU mG mU# mA# mA#
[3XGalNAc],
and/or
where the second strand is shown below:
(SEQ ID NO: 2086)
5′[phos]mG# fA# mU fA mG fU mU fG mU fA mA
fA mC fA mG# fU# fU# fC# rC fA# mG# fU mC
fG mU fU mU fC mA fU mU mC# mA# mA#
[3XGalNAc];
(SEQ ID NO: 2087)
5′[phos]mU# fU# mA fC mA fA mC fA mG fA mA
fU mA fU mG# fG# mU# fA# rU fA# mG# fU mC
fG mU fU mU fC mA fU mU mC# mA# mA#
[3XGalNAc];
(SEQ ID NO: 2088)
5′[phos]mG# fA# mU fA mG fU mU fG mU fA mA
fA mC fA mG# fU# fU# fC# rC fC mU fG mA
fG mU fC mU fG mU fG mG mC# mA# mA#
[3XGalNAc];
or
(SEQ ID NO: 2089)
5′[phos]mU# fU# mA fC mA fA mC fA mG fA mA
fU mA fU mG# fG# mU# fA# rU fC mU fG mA
fG mU fC mU fG mU fG mG mC# mA# mA#
[3XGalNAc],

[0206] where Phos being phosphate; [mN], N being any nucleoside, designates 2′-OMe; [fN], N being any nucleoside, designates: 2′-F; [rA], N being any nucleoside, designates: 2′-OH; [#] designates a phosphorothioate connecting two adjacent nucleosides; and [3XGalNAc] designates the following ligand, where the strand to which the ligand is bound is shown in square brackets:

[chemical structure]

[0207] The combination of the first mentioned first strand and the first mentioned second strand is particularly advantageous and also referred to as “STP247G” herein.

[0208] In certain embodiments, the construct is selected from Construct ID NO: B106-C5-30, B106-C5-37, B13-C5-30 and B13-C5-37 (SEQ ID Nos. 2067-2074, in the order presented), advantageously, where the construct is Construct ID NO: B106-C5-30, which is STP247G (SEQ ID Nos. 2067-2068).

### Ligands

[0209] The nucleic acid construct according to the second aspect and the aforementioned embodiments may further comprise one or more ligands.

[0210] In certain embodiments, the first nucleic acid portion of (a), and/or the second nucleic acid portion of (b), and/or the third nucleic acid portion of (c), and/or the fourth nucleic acid portion of (d), and/or, to the extent present, the 1 to 8 additional nucleic acid portions as defined previously herein, and/or the passenger nucleic acid portions as defined previously herein, respectively may have a 5′ to 3′ directionality thereby defining 5′ and 3′ regions thereof.

[0211] In certain embodiments, one or more ligands are conjugated at the 3′ region, advantageously the 3′ end, of any of (i) the third nucleic acid portion of (c), and/or (ii) the fourth nucleic acid portion of (d), and/or, to the extent present, the (iii) passenger nucleic acid portions as defined previously herein.

[0212] In certain embodiments, one or more ligands may be conjugated at one or more regions intermediate of the 5′ and 3′ regions of any of the nucleic acid portions, advantageously of the third nucleic acid portion of (c), and/or the fourth nucleic acid portion of (d), and/or the passenger nucleic acid portions as defined previously herein.

[0213] In certain embodiments, one or more ligands may be conjugated at the 5′ region, advantageously the 5′ end, of any of the nucleic acid portions.

[0214] In certain embodiments, the one or more ligands may be any cell directing moiety, such as lipids, carbohydrates, aptamers, vitamins and/or peptides that bind cellular membrane or a specific target on cellular surface. In a advantageous embodiment, the one or more carbohydrates can be a monosaccharide, disaccharide, trisaccharide, tetrasaccharides, oligosaccharide or polysaccharide. In a more advantageous embodiment, the one or more carbohydrates may comprise one or more hexose moieties. Especially, the one or more hexose moieties may be one or more galactose moieties, one or more lactose moieties, one or more N-Acetyl-Galactosamine moieties, and/or one or more mannose moieties. The hexose moiety may be comprise two or three N-Acetyl-Galactosamine moieties. In particular, the hexose moiety may comprise three N-Acetyl-Galactosamine moieties.

[0215] In certain embodiments, the one or more ligands may be attached in a linear configuration, or in a branched configuration. Advantageously, where the one or more ligands may be attached as a biantennary or triantennary configuration, or as a configuration based on single ligands at different positions.

[0216] Advantageously, the ligand may have the following structure:

[chemical structure]

### Internucleoside Linkages

[0217] The nucleotide construct according to the second aspect of the disclosed embodiments or its aforementioned embodiments may comprise one or more phosphorothioate or phosphorodithioate internucleotide linkages.

[0218] In certain embodiments, the nucleic acid construct may comprise 1 to 15 phosphorothioate or phosphorodithioate internucleotide linkages.

[0219] In certain embodiments, the nucleic acid construct may comprise one or more phosphorothioate or phosphorodithioate internucleotide linkages at one or more of the 5′ and/or 3′ regions of the first nucleic acid portion of (a), and/or the second nucleic acid portion of (b), and/or the third nucleic acid portion of (c), and/or the fourth nucleic acid portion of (d), and/or the 1 to 8 additional nucleic acid portions as defined previously herein, and/or the passenger nucleic acid portions as defined in previously herein.

[0220] In certain embodiments, the nucleic acid construct may comprise phosphorothioate or phosphorodithioate internucleotide linkages between at least two adjacent nucleotides of the nucleic acid linker portion as defined in previously herein.

[0221] In certain embodiments, the nucleic acid construct may comprise a phosphorothioate or phosphorodithioate internucleotide linkage between each adjacent nucleotide that is present in the nucleic acid linker portion.

[0222] In certain embodiments, the nucleic acid construct may contain a phosphorothioate or phosphorodithioate internucleotide linkage linking:
[0223] the first nucleic acid portion of (a) to the nucleic acid linker portion as defined in previously herein; and/or
[0224] the second nucleic acid portion of (b) to the nucleic acid linker portion as defined previously herein; and/or
[0225] the third nucleic acid portion of (c) to the nucleic acid linker portion as defined previously herein and/or
[0226] the fourth nucleic acid portion of (d) to the nucleic acid linker portion as defined previously herein; and/or
[0227] the 1 to 8 additional nucleic acid portions as defined previously herein to the nucleic acid linker portion as further defined previously herein; and/or
[0228] the passenger nucleic acid portions as defined previously herein to the nucleic acid linker portion as further defined previously herein.

### Modifications

[0229] In the nucleic acid construct according to the second aspect of the disclosed embodiments and its aforementioned embodiments, at least one nucleotide of at least one of the following may be modified:
[0230] the first nucleic acid portion of (a); and/or
[0231] the second nucleic acid portion of (b); and/or
[0232] the third nucleic acid portion of (c); and/or
[0233] the fourth nucleic acid portion of (d); and/or
[0234] to the extent present, the 1 to 8 additional nucleic acid portions as defined previously herein; and/or
[0235] to the extent present, the passenger nucleic acid portions as defined previously herein; and/or
[0236] to the extent present, the nucleic acid linker portion as further defined previously herein.

[0237] In a advantageous embodiment, one or more of the odd numbered nucleotides starting from the 5′ region of one of the following may be modified, and/or where one or more of the even numbered nucleotides starting from the 5′ region of one of the following are modified, where typically the modification of the even numbered nucleotides is a second modification that is different from the modification of odd numbered nucleotides:
[0238] the first nucleic acid portion of (a); and/or
[0239] the second nucleic acid portion of (b); and/or
[0240] the third nucleic acid portion of (c); and/or
[0241] the fourth nucleic acid portion of (d); and/or
[0242] to the extent present, the 1 to 8 additional nucleic acid portions as defined previously herein; and/or
[0243] to the extent present, the passenger nucleic acid portions as defined previously herein.

[0244] In certain embodiments, one or more of the odd numbered nucleotides starting from the 3′ region of the third nucleic acid portion of (c) may be modified by a modification that is different from the modification of odd numbered nucleotides starting from the 5′ region of the first nucleic acid portion of (a); and/or
[0245] one or more of the odd numbered nucleotides starting from the 3′ region of the fourth nucleic acid portion of (d) may be modified by a modification that is different from the modification of odd numbered nucleotides starting from the 5′ region of the second nucleic acid portion of (b); and/or
[0246] one or more of the odd numbered nucleotides starting from the 3′ region of the passenger nucleic acid portions as defined previously herein, to the extent present, may be modified by a modification that is different from the modification of odd numbered nucleotides starting from the 5′ region of the 1 to 8 additional nucleic acid portions as defined previously herein; and/or
[0247] where one or more of the nucleotides of a nucleic acid linker portion as further defined previously herein, to the extent present, may be modified by a modification that (i) is different from the modification of an adjacent nucleotide of the 3′ region of the first nucleic acid portion of (a); and/or (ii) is different from the modification of an adjacent nucleotide of the 3′ region of the second nucleic acid portion of (b); and/or is different from the modification of an adjacent nucleotide of the 3′ region of the 1 to 8 additional nucleic acid portions, to the extent present, as defined previously herein.

[0248] In certain embodiments, one or more of the even numbered nucleotides starting from the 3′ region of: (i) the third nucleic acid portion of (c), and/or (ii) the fourth nucleic acid portion of (d), and/or (iii) the passenger nucleic acid portions as defined previously herein, to the extent present, may be modified by a modification that is different from the modification of odd numbered nucleotides starting from the 3′ region of these respective portions.

[0249] In certain embodiments, at least one or more of the modified even numbered nucleotides of (i) the first nucleic acid portion of (a), and/or (ii) the second nucleic acid portion of (b), and/or (iii), to the extent present, the 1 to 8 additional nucleic acid portions as defined previously herein, may be adjacent to at least one or more differently modified odd numbered nucleotides of these respective portions.

[0250] In certain embodiments, at least one or more of the modified even numbered nucleotides of (i) the third nucleic acid portion of (c), and/or (ii) the fourth nucleic acid portion of (d), and/or (iii), to the extent present, the passenger nucleic acid portions as defined previously herein, may be adjacent to at least one or more differently modified odd numbered nucleotides of these respective portions.

[0251] In certain embodiments, a plurality of adjacent nucleotides of (i) the first nucleic acid portion of (a), and/or (ii) the second nucleic acid portion of (b), and/or (iii), to the extent present, the 1 to 8 additional nucleic acid portions as defined previously herein, may be modified by a common modification.

[0252] In certain embodiments, a plurality of adjacent nucleotides of (i) the third nucleic acid portion of (c), and/or (ii) the fourth nucleic acid portion of (d), and/or (iii), to the extent present, the passenger nucleic acid portions as defined previously herein, may be modified by a common modification.

[0253] In certain embodiments, the plurality of adjacent commonly modified nucleotides may be 2 to 4 adjacent nucleotides, advantageously 3 or 4 adjacent nucleotides.

[0254] In certain embodiments, the plurality of adjacent commonly modified nucleotides may be located in the 5′ region of (i) the third nucleic acid portion of (c), and/or (ii) the fourth nucleic acid portion of (d), and/or (iii), to the extent present, the passenger nucleic acid portions previously herein.

[0255] In certain embodiments, a plurality of adjacent commonly modified nucleotides may be located in the nucleic acid linker portion as further defined previously herein.

[0256] In certain embodiments, the one or more of the modified nucleotides of first nucleic acid portion of (a) may not have a common modification present in the corresponding nucleotide of the third nucleic acid portion of (c) of the first duplex region; and/or one or more of the modified nucleotides of second nucleic acid portion of (b) may not have a common modification present in the corresponding nucleotide of the fourth nucleic acid portion of (d) of the second duplex region; and/or one or more of the modified nucleotides of the 1 to 8 additional nucleic acid portions, to the extent present, as defined previously herein, may not have a common modification present in the corresponding nucleotide of the corresponding passenger nucleic acid portions of the respective duplex regions.

[0257] In certain embodiments, the one or more of the modified nucleotides of the first nucleic acid portion of (a) may be shifted by at least one nucleotide relative to a commonly modified nucleotide of the third nucleic acid portion of (c); and/or one or more of the modified nucleotides of the second nucleic acid portion of (b) may be shifted by at least one nucleotide relative to a commonly modified nucleotide of the fourth nucleic acid portion of (d); and/or one or more of the modified nucleotides of the 1 to 8 additional nucleic acid portions, to the extent present, as defined previously herein may be shifted by at least one nucleotide relative to a commonly modified nucleotide of the passenger nucleic acid portions, to the extent present, as defined previously herein.

[0258] In certain embodiments, the modification and/or modifications may be each and individually sugar, phosphate, or base modifications.

[0259] In certain embodiments, the modification may be selected from nucleotides with 2′ modified sugars; conformationally restricted nucleotides (CRN) sugar such as locked nucleic acid (LNA), (S)-constrained ethyl bicyclic nucleic acid, and constrained ethyl (cEt), tricyclo-DNA; morpholino, unlocked nucleic acid (UNA), glycol nucleic acid (GNA), D-hexitol nucleic acid (HNA), and cyclohexene nucleic acid (CeNA). In advantageous embodiments, where the 2′ modified sugar may be selected from 2′-O-alkyl modified sugar, 2′-O-methyl modified sugar, 2′-O-methoxyethyl modified sugar, 2′-O-allyl modified sugar, 2′-C-allyl modified sugar, 2′-deoxy modified sugar such as 2′-deoxy ribose, 2′-F modified sugar, 2′-arabino-fluoro modified sugar, 2′-O-benzyl modified sugar, 2′-amino modified sugar, and 2′-O-methyl-4-pyridine modified sugar.

[0260] In certain embodiments, the base modification may be any one of an abasic nucleotide and a non-natural base containing nucleotide.

[0261] In certain embodiments, at least one modification may be a 2′-O-methyl modification in a ribose moiety.

[0262] In certain embodiments, at least one modification may be a 2′-F modification in a ribose moiety.

[0263] In certain embodiments, the nucleotides at any of positions 2 and 14 downstream from the first nucleotide of the 5′ region of (i) the first nucleic acid portion of (a); and/or (ii) the second nucleic acid portion of (b); and/or (iii), to the extent present, the 1 to 8 additional nucleic acid portions as defined previously herein; may not contain 2′-O-methyl modifications in ribose moieties.

[0264] In certain embodiments, one, two or all three nucleotides of (i) the third nucleic acid portion of (c); and/or (ii) the fourth nucleic acid portion of (d); and/or (iii), to the extent present, the passenger nucleic acid portions as defined previously herein; that respectively correspond in position to any of the nucleotides at any of positions 11 to 13 downstream from the first nucleotide of the 5′ region of (i) the first nucleic acid portion of (a); and/or (ii) the second nucleic acid portion of (b); and/or (iii) the 1 to 8 additional nucleic acid portions, to the extent present, as defined previously herein; may not contain 2′-O-methyl modifications in ribose moieties.

[0265] In certain embodiments, the nucleotides at any of positions 2 and 14 downstream from the first of (i) the first nucleic acid portion of (a); and/or (ii) the second nucleic acid portion of (b); and/or (iii), to the extent present, the 1 to 8 additional nucleic acid portions as defined previously herein; may contain 2′-F modifications in ribose moieties.

[0266] In certain embodiments, one, two or all three nucleotides of (i) the third nucleic acid portion of (c); and or (ii) the fourth nucleic acid portion of (d); and/or (iii), to the extent present, the passenger nucleic acid portions as defined previously herein; that respectively correspond in position to any of the nucleotides at any of positions 11 to 13 downstream from the first nucleotide of the 5′ region of (i) the first nucleic acid portion of (a); and/or (ii) the second nucleic acid portion of (b); and/or (iii), to the extent present, the 1 to 8 additional nucleic acid portions as defined previously herein; may contain 2′-F modifications in ribose moieties.

[0267] In certain embodiments, all remaining nucleotides may contain either 2′-O-methyl modifications or 2′-F modifications in ribose moieties, advantageously with the exception of the unmodified nucleotide(s) in accordance with the labile linkage defined herein. Advantageously, the remaining nucleotides may contain 2′-O-methyl modifications in ribose moieties.

[0268] In certain embodiments, the one or more, advantageously one, unmodified nucleotide represents any of the nucleotides of the nucleic acid linker portion as further defined previously herein, advantageously the nucleotide of the nucleic acid linker portion as further defined previously herein that is adjacent to (i) the third nucleic acid portion of (c); and or (ii) the fourth nucleic acid portion of (d); and/or (iii), to the extent present, the passenger nucleic acid portions as defined previously herein.

[0269] In certain embodiments,
[0270] (a) the first nucleic acid portion may be selected from Table 3a;
[0271] (b) the second nucleic acid portion may be selected from Table 3a;
[0272] (c) the third nucleic acid portion may be selected from Table 3b; and/or
[0273] (d) the fourth nucleic acid portion may be selected from Table 3b.

[0274] In advantageous embodiments, the first nucleic acid portion and the second nucleic acid portion may be selected from Table 3a, where the first and second nucleic acid portions are different; and the third and fourth nucleic acid portions may be selected from Table 3b.

[0275] In certain embodiments, the 3′ terminal positions of the first and the third nucleic acid portions may be replaced with an unmodified nucleotide.

[0276] In certain embodiments, the nucleic acid construct may comprise at least one vinylphosphonate modification, such as at least one vinylphosphonate modification in the 5′ region of (i) the first nucleic acid portion of (a); and/or (ii) the second nucleic acid portion of (b); and/or (iii), to the extent present, the 1 to 8 additional nucleic acid portions as defined previously herein.

[0277] In certain embodiments, one or more nucleotides of
[0278] the first nucleic acid portion of (a); and/or
[0279] the second nucleic acid portion of (b); and/or
[0280] the third nucleic acid portion of (c); and/or
[0281] the fourth nucleic acid portion of (d); and/or
[0282] to the extent present, the 1 to 8 additional nucleic acid portions as defined previously herein; and/or
[0283] to the extent present, the passenger nucleic acid portions as defined previously herein;
[0284] may be an inverted an inverted nucleotide and may be attached to the adjacent nucleotide via the 3′ carbon of the nucleotide and the 3′ carbon of the adjacent nucleotide, and/or may be an inverted nucleotide and may be attached to the adjacent nucleotide via the 5′ carbon of the nucleotide and the 5′ carbon of the adjacent nucleotide.

[0285] In certain embodiments, the inverted nucleotide may be attached to the adjacent nucleotide via a phosphate group by way of a phosphodiester linkage; or may be attached to the adjacent nucleotide via a phosphorothioate group; or may be attached to the adjacent nucleotide via a phosphorodithioate group.

[0286] In certain embodiments, the modifications among strands within the constructs include alternating modification pattern, advantageously with odd-numbered nucleotides being fluoro-substituted and even-numbered nucleotides being —OME substituted.

Compositions and Pharmaceutical Compositions Including muRNA Oligomeric Constructs

[0287] According to a second aspect, the disclosed embodiments is directed to a composition containing a nucleic acid construct according to the first aspect, and a physiologically acceptable excipient.

[0288] According to a third aspect, the disclosed embodiments is directed to a pharmaceutical composition containing a nucleic acid construct according to the first aspect.

[0289] The pharmaceutical composition may further comprise a pharmaceutically acceptable excipient, diluent, antioxidant, and/or preservative.

[0290] The oligomeric compound according to the first aspect and/or the construct according to the second aspect may be the only pharmaceutically active agent(s).

[0291] Alternatively, the pharmaceutical composition furthermore contain one or more further pharmaceutically active agents. The further pharmaceutically active agent(s) is/are (an) agent(s), which modulate(s) the innate and/or the adaptive immune system, for example a further oligomeric compound, which is directed to an immune system target, and/or compounds targeting other components of the immune system, such as components of the proximal complement pathway, in particular Lectin pathway: MASP-2 targeting compounds and/or C3-targeting compounds and/or compounds selected from the group consisting of Sutimlimab, Narsoplimab, Pegcetacoplan AMY-102, IONIS-FB-LRx-LPNO23, Lapalizumab, Mini-FH/AMY-201 MicroCept, and GLG561 or combinations thereof.

Diseases to be Treated by the muRNA Oligomeric Compounds and Further Uses

[0292] According to a fourth aspect, the disclosed embodiments are directed to the nucleic acid construct according to first aspect of the disclosed embodiments, for use in human or veterinary medicine or therapy.

[0293] According to a fifth aspect, the disclosed embodiments are directed to the nucleic acid construct according to the first aspect of the disclosed embodiments, for use in a method of treating, ameliorating and/or preventing a disease or disorder.

[0294] The disease or disorder is a disease or disorder associated with CFB and/or C5 or a disease or disorder requiring reduction of CFB and/or C5 expression.

[0295] In particular, the disease or disorder is selected from the group consisting of hematological diseases, such as, Paroxysmal Nocturnal Hemoglobinuria (PNH); nephrological diseases, such as Atypical Hemoytic-Uremic Syndrome (aHUS), C3 glomerulonephritis, dense deposit dissease, Immune Complex Membranoproliferative Glomerulonephritis, IgA nephropathy; neurological diseases, such as Generalized Myasthenia Gravis (GMG), Relapsing Neuromyelitisi Optica (NMO), Amyotrophic Lateral Sclerosis (ALS), ophthalmological diseases, such as Age-related Macular Degeneration, Geographic Atrophy; oncological diseases; rheumatological diseases; and transplant-related diseases.

[0296] The disease or disorder is advantageously PNH. Due to the inventors' finding that the nucleic acid constructs disclosed herein targeting CFB and C5 and producing their knock down, these nucleic acid constructs have the potential of being effective in PNH therapy. This is because it is assumed, without being bound by any theory, that the C5-targeting part of the nucleic acid constructs prevent intravascular hemolysis and the CFB-targeting part of the nucleic acid constructs prevent extravascular hemolysis.

[0297] According to a sixth aspect, the disclosed embodiments are directed to a method of treating a disease or disorder containing administration the nucleic acid construct according to the first aspect of the disclosed embodiments, to an individual in need of treatment.

[0298] The nucleic acid construct may be administered subcutaneously or intravenously to the individual.

[0299] According to a seventh aspect, the disclosed embodiments are directed to a use of a nucleic acid construct according to the first aspect, for use in research as a gene function analysis tool.

[0300] According to an eighth aspect, the disclosed embodiments are directed to a use of the nucleic acid construct according to the first aspect in the manufacture of a medicament for a treatment of a disease or disorder.

### Constructs and Sequences of the Novel Oligomeric Compounds

[0301] The following Tables show nucleobase sequences of antisense and sense strands of oligomeric compounds of the disclosed embodiments as well as of nucleobase sequences of single-stranded oligomeric compounds of the disclosed embodiments, and definitions of modified oligomeric compounds of the disclosed embodiments (the notation including nucleobase sequence, sugar modifications, and, where applicable, modified phosphates).

[0302] The notation used is common in the art and as the following meaning:
[0303] A represents adenine;
[0304] U represents uracil;
[0305] C represents cytosine;
[0306] G represents guanine.
[0307] 5Phos represents a 5′ terminal phosphate group, which is advantageous but not indispensable;
[0308] m represents a methyl modification at the 2′ position of the sugar of the underlying nucleoside;
[0309] f represents a fluoro modification at the 2′ position of the sugar of the underlying nucleoside;
[0310] r indicates an unmodified (2′-OH) ribonucleotide;
[0311] [Ps] or #represents a phosphorothioate inter-nucleoside linkage;
[0312] i represents an inverted inter-nucleoside linkage, which can be either 3′-3′, or 5′-5′;
[0313] 3× GalNAc represents a trivalent GalNAc.

[0314] Tables 1a and 1 b below show nucleobase sequences of antisense and sense strands of 252 oligomeric compounds in accordance with the examples.

TABLE 1a
Nucleobase sequences of the CFB antisense strands
of 252 constructs

| SEQ | Experimental | |
|---|---|---|
| ID NO. | Label | 19 mer Antisense |
| 1 | CFB01 | UAGAAAACCCAAAUCCUCA |
| 2 | CFB02 | GCUGUCUGAUCCAUCUAGC |
| 3 | CFB03 | AACCAUGCCACAGAGACUC |
| 4 | CFB04 | GAUCCAUCUAGCACCAGGU |
| 5 | CFB05 | AAAACCCAAAUCCUCAUCU |
| 6 | CFB06 | UCCAUCUAGCACCAGGUAG |
| 7 | CFB07 | GAAAACCCAAAUCCUCAUC |
| 8 | CFB08 | UGUCUGAUCCAUCUAGCAC |
| 9 | CFB09 | AACCCAAAUCCUCAUCUUG |
| 10 | CFB10 | AUCCAUCUAGCACCAGGUA |
| 11 | CFB11 | AAACCCAAAUCCUCAUCUU |
| 12 | CFB12 | CCAUGCCACAGAGACUCAG |
| 13 | CFB13 | AUGCCACAGAGACUCAGAG |
| 14 | CFB14 | GAUGAUGACAUGGCGGGUG |
| 15 | CFB15 | UUCCAUAUCCUUGACUUUG |
| 16 | CFB16 | UACACCAACUUGAAUGAAA |
| 17 | CFB17 | UGCCACAGAGACUCAGAGA |
| 18 | CFB18 | ACCAUGCCACAGAGACUCA |
| 19 | CFB19 | CCAUCUAGCACCAGGUAGA |
| 20 | CFB20 | UUUCCAUAUCCUUGACUUU |
| 21 | CFB21 | UGAUCCAUCUAGCACCAGG |
| 22 | CFB22 | GCCACAGAGACUCAGAGAC |
| 23 | CFB23 | CUGAUCCAUCUAGCACCAG |
| 24 | CFB24 | GACCUCCUUCCGAGUCAGC |
| 25 | CFB25 | GUCUGAUCCAUCUAGCACC |
| 26 | CFB26 | GUCUUGGCAGGAAGGCUCC |
| 27 | CFB27 | AUCUAGCACCAGGUAGAUG |
| 28 | CFB28 | AAAGUACUCAGACACCACA |
| 29 | CFB29 | CUGUCUGAUCCAUCUAGCA |
| 30 | CFB30 | CAUCUAGCACCAGGUAGAU |
| 31 | CFB31 | CCAAAUCCUCAUCUUGGAG |
| 32 | CFB32 | CAUAGUCAUAAAAUUCAGG |
| 33 | CFB33 | GAGGAUGAUGACAUGGCGG |
| 34 | CFB34 | ACAAUCUGUGUUCUGGCAC |
| 35 | CFB35 | UUGAGCUUGAUCAGGGCAA |
| 36 | CFB36 | CAGUGGAAAGAGAUCUCAU |
| 37 | CFB37 | UAGAUGUUCAUGGAGCCUG |
| 38 | CFB38 | GGCAAGUGGUAGUUGGAGG |
| 39 | CFB39 | UCACACCAUAACUUGCCAC |
| 40 | CFB40 | GAAAGAGAUCUCAUCACUC |
| 41 | CFB41 | UUCAACUUGUGGUCUUCAU |
| 42 | CFB42 | GAAACGACUUCUCUUGUGA |
| 43 | CFB43 | GGUAUGUGGCAUAUGUCAC |
| 44 | CFB44 | UGUCUUUCUUGGAAGCCAA |
| 45 | CFB45 | ACAUCCAGAUAAUCCUCCC |
| 46 | CFB46 | CUUGACUUUGUCAUAGCCU |
| 47 | CFB47 | GAAACUCCAGACCUAGACC |
| 48 | CFB48 | CAUAACUUGCCACCUUCUC |
| 49 | CFB49 | UCAUAGUCAUAAAAUUCAG |
| 50 | CFB50 | UUGGCUCCUGUGAAGUUGC |
| 51 | CFB51 | CAAAGUACUCAGACACCAC |
| 52 | CFB52 | UGCUCAUUGUCUUUCUUGG |
| 53 | CFB53 | AUAAAAUUCAGGAAUUCCU |
| 54 | CFB54 | UGAGAUCUUGGCCUGCCAU |
| 55 | CFB55 | UGAGCAUCUCUCUCACAGC |
| 56 | CFB56 | UAACCGUCAUAGCAGUGGA |
| 57 | CFB57 | CAGAGCUUUGAUAUCCUGU |
| 58 | CFB58 | AACAAUGUGCUGCUGUCAG |
| 59 | CFB59 | GGGUACGGGUAGAAGCCAG |
| 60 | CFB60 | CCAGACCUAGACCUGGUCA |
| 61 | CFB61 | CUUCUCUUGUGAACUAUCA |
| 62 | CFB62 | AUUCAGGAAUUCCUGCUUC |
| 63 | CFB63 | UCCAGGUUUUCCAUAUCCU |
| 64 | CFB64 | CCAACUUGAAUGAAACGAC |
| 65 | CFB65 | UGUGCUGCUGUCAGCACAA |
| 66 | CFB66 | AGACCUCCUUCCGAGUCAG |
| 67 | CFB67 | UCAAUUAAGUUGACUAGAC |
| 68 | CFB68 | CUGACACGUUCGCCGCUGG |
| 69 | CFB69 | UCAUUGUCUUUCUUGGAAG |
| 70 | CFB70 | ACCAACUUGAAUGAAACGA |
| 71 | CFB71 | GCACAAAGUACUCAGACAC |
| 72 | CFB72 | CUGCAGUGGUAGGUGACGC |
| 73 | CFB73 | GUCAUGAGGAUGAUGACAU |
| 74 | CFB74 | CUUCAACUUGUGGUCUUCA |
| 75 | CFB75 | GGUAGUUGGAGGAAGCCUC |
| 76 | CFB76 | UCAUGCUGUACACUGCCUG |
| 77 | CFB77 | UUGUCUUUCUUGGAAGCCA |
| 78 | CFB78 | UCGACUCCUUCUAUGGUCU |
| 79 | CFB79 | AGACAUCCAGAUAAUCCUC |
| 80 | CFB80 | CUGAGAUCUUGGCCUGCCA |
| 81 | CFB81 | GACGCUGUCUUCAAGGCGG |
| 82 | CFB82 | AAGACAGGAAAGCUUCGGC |
| 83 | CFB83 | UUUGAACACAUGUUGCUCA |
| 84 | CFB84 | CAUAAAAUUCAGGAAUUCC |
| 85 | CFB85 | ACCCAAAUCCUCAUCUUGG |
| 86 | CFB86 | AAAGAGAUCUCAUCACUCA |
| 87 | CFB87 | CAAAGCAUUGAUGUUCACU |
| 88 | CFB88 | CAGGAAUUCCUGCUUCUUU |
| 89 | CFB89 | CAUGAAGGAGUCUUGGCAG |
| 90 | CFB90 | AAAGCUUCGGCCACCUCUU |
| 91 | CFB91 | UUGACUUUGUCAUAGCCUG |
| 92 | CFB92 | GUCCAAGCUGAAACUCCAG |
| 93 | CFB93 | CCCAAAUCCUCAUCUUGGA |
| 94 | CFB94 | GCAGCUGUUUUAAUUCAAU |
| 95 | CFB95 | AAACGACUUCUCUUGUGAA |
| 96 | CFB96 | CCCGGAACAUCCAAGCGGG |
| 97 | CFB97 | CCAAACACAUAGACAUCCA |
| 98 | CFB98 | CUUCACACCAUAACUUGCC |
| 99 | CFB99 | UUCUCUUGUGAACUAUCAA |
| 100 | CFB100 | AAUUCAGGAAUUCCUGCUU |
| 101 | CFB101 | AGACACUUUGACCCAAAUU |
| 102 | CFB102 | ACACAAACAGAGCUUUGAU |
| 103 | CFB103 | ACAAACAGAGCUUUGAUAU |
| 104 | CFB104 | CUUGGAGUUUCUCCUUCAG |
| 105 | CFB105 | UUCACACCAUAACUUGCCA |
| 106 | CFB106 | UUGAAUGAAACGACUUCUC |
| 107 | CFB107 | CCAGGUUUUCCAUAUCCUU |
| 108 | CFB108 | AGCAUCUCUCUCACAGCUG |
| 109 | CFB109 | GACAUCCAGAUAAUCCUCC |
| 110 | CFB110 | UCGAGUUGUUCCCUCGGUG |
| 111 | CFB111 | AACACAUGUUGCUCAUUGU |
| 112 | CFB112 | UUCUCAAUUAAGUUGACUA |
| 113 | CFB113 | GGAAGCCAAAGCAUUGAUG |
| 114 | CFB114 | AGCAGUGGAAAGAGAUCUC |
| 115 | CFB115 | UACACUGCCUGGAGGGCCU |
| 116 | CFB116 | CUAGACCUGGUCACAUUCC |
| 117 | CFB117 | UCAGACACAAACAGAGCUU |
| 118 | CFB118 | GGAGUUUCUCCUUCAGCCA |
| 119 | CFB119 | AAUGUGCUGCUGUCAGCAC |
| 120 | CFB120 | ACAGAGCUUUGAUAUCCUG |
| 121 | CFB121 | UGAUAUCCUGUGCAGGGAG |
| 122 | CFB122 | CAGGGCAACGUCAUAGUCA |
| 123 | CFB123 | CAGACCUAGACCUGGUCAC |
| 124 | CFB124 | AAGUACUCAGACACCACAG |
| 125 | CFB125 | GAAGGCUCCGUCCCGCUCC |
| 126 | CFB126 | AGGGCAACGUCAUAGUCAU |
| 127 | CFB127 | GCUGUUUUAAUUCAAUCCC |
| 128 | CFB128 | AAGAGAUCUCAUCACUCAC |
| 129 | CFB129 | UGGUCUUCAUAAUUGAUUU |
| 130 | CFB130 | CCAUAUCUUGGCUUCACAC |
| 131 | CFB131 | ACACCAACUUGAAUGAAAC |
| 132 | CFB132 | CAGCUGUUUUAAUUCAAUC |
| 133 | CFB133 | AUAACUUGCCACCUUCUCA |
| 134 | CFB134 | GUGAGCAGGUACCUGCUUU |
| 135 | CFB135 | CUUGAUGUAGACCUCCUUC |
| 136 | CFB136 | UGGCAAGUGGUAGUUGGAG |
| 137 | CFB137 | AGGAAGCCUCAAAGCUCGA |
| 138 | CFB138 | CAAUGACAGUAAUUGGGUC |
| 139 | CFB139 | CUUUGAACACAUGUUGCUC |
| 140 | CFB140 | CAAAUCCUCAUCUUGGAGU |
| 141 | CFB141 | UGGAGUUUCUCCUUCAGCC |
| 142 | CFB142 | CCAUAACUUGCCACCUUCU |
| 143 | CFB143 | AGCUGUUUUAAUUCAAUCC |
| 144 | CFB144 | AAAGCUCGAGUUGUUCCCU |
| 145 | CFB145 | GGGCAACGUCAUAGUCAUA |
| 146 | CFB146 | CUUCCAGGUUUUCCAUAUC |
| 147 | CFB147 | UUCCAGGUUUUCCAUAUCC |
| 148 | CFB148 | CCCAUGUUGUGCAAUCCAU |
| 149 | CFB149 | CCAUAUCCUUGACUUUGAA |
| 150 | CFB150 | UUGACUUUGAACACAUGUU |
| 151 | CFB151 | CCUCAUCUUGGAGUUUCUC |
| 152 | CFB152 | ACAUGUUGCUCAUUGUCUU |
| 153 | CFB153 | CACCAACUUGAAUGAAACG |
| 154 | CFB154 | CACAGAUCGCUGUCUGCCC |
| 155 | CFB155 | CUCACAGCUGCCUUUCUUA |
| 156 | CFB156 | GGGCCGCCAGAAUCACCUC |
| 157 | CFB157 | UCCAAGCUGAAACUCCAGA |
| 158 | CFB158 | CUUGAUCAGGGCAACGUCA |
| 159 | CFB159 | UGUUCCCAAACCAUGCCAC |
| 160 | CFB160 | UACCUGCUUUUGCCGCUUC |
| 161 | CFB161 | GUUGCUCAUUGUCUUUCUU |
| 162 | CFB162 | ACACGUUCGCCGCUGGGAG |
| 163 | CFB163 | CCAUUCUUGAUGUAGACCU |
| 164 | CFB164 | CUUGAGCUUGAUCAGGGCA |
| 165 | CFB165 | CAUUCUUGAUGUAGACCUC |
| 166 | CFB166 | AUGAAGGAGUCUUGGCAGG |
| 167 | CFB167 | CUUGGCUUCACACCAUAAC |
| 168 | CFB168 | UAUCUUGGCUUCACACCAU |
| 169 | CFB169 | UCUCACAGCUGCCUUUCUU |
| 170 | CFB170 | CCCAAUGCUGUCUGAUCCA |
| 171 | CFB171 | GGAGUGGUGGUCACACCUC |
| 172 | CFB172 | CAUAGGGACUCACUCCUCC |
| 173 | CFB173 | CCUGACUUCAACUUGUGGU |
| 174 | CFB174 | CUUCUCAAUUAAGUUGACU |
| 175 | CFB175 | GAGUUUCUCCUUCAGCCAG |
| 176 | CFB176 | GAGCUUUGAUAUCCUGUGC |
| 177 | CFB177 | AUGUCCUUGACUUUGUCAU |
| 178 | CFB178 | GCAGGUACGUGUCUGCACA |
| 179 | CFB179 | GAAACAAUGUGCUGCUGUC |
| 180 | CFB180 | GAUAUCCUGUGCAGGGAGC |
| 181 | CFB181 | AGACUCAGAGACUGGCUUU |
| 182 | CFB182 | UCAAUGACAGUAAUUGGGU |
| 183 | CFB183 | AGAGCCACCUUCCUGACAC |
| 184 | CFB184 | CCUUGACUUUGAACACAUG |
| 185 | CFB185 | AAUGAAACGACUUCUCUUG |
| 186 | CFB186 | GGAAGACAGGAAAGCUUCG |
| 187 | CFB187 | AGCUUUGAUAUCCUGUGCA |
| 188 | CFB188 | UUCUUGAGCUUGAUCAGGG |
| 189 | CFB189 | UGGAUUGCUCUGCACUCUG |
| 190 | CFB190 | GCAUAUUGAGCAUCUCUCU |
| 191 | CFB191 | UAUCCUUGACUUUGAACAC |
| 192 | CFB192 | UGCAGACAUCCACUACUCC |
| 193 | CFB193 | UAGACCUCCUUCCGAGUCA |
| 194 | CFB194 | CACCUUCUCAAUUAAGUUG |
| 195 | CFB195 | GAGAAGUCGGAAGGAGCCG |
| 196 | CFB196 | CUGCACAGGGUACGGGUAG |
| 197 | CFB197 | AAUGACAGUAAUUGGGUCC |
| 198 | CFB198 | UGUUAGUCCCUGACUUCAA |
| 199 | CFB199 | CAUAUCCUUGACUUUGAAC |
| 200 | CFB200 | GGUACGUGUCUGCACAGGG |
| 201 | CFB201 | UGUCAGCACAAAGUACUCA |
| 202 | CFB202 | GUGGUCUUCAUAAUUGAUU |
| 203 | CFB203 | ACAGAGACUCAGAGACUGG |
| 204 | CFB204 | AUAGACAUCCAGAUAAUCC |
| 205 | CFB205 | CCUCCUUCCGAGUCAGCUU |
| 206 | CFB206 | UCAUGGAGCCUGAAGGGUC |
| 207 | CFB207 | GUGGCAUAUGUCACUAGAC |
| 208 | CFB208 | AAAGCAUUGAUGUUCACUU |
| 209 | CFB209 | ACUCACUCCUCCAGUACAA |
| 210 | CFB210 | AGAUGUCCUUGACUUUGUC |
| 211 | CFB211 | CUGUUUUAAUUCAAUCCCA |
| 212 | CFB212 | GUAGAUGUUCAUGGAGCCU |
| 213 | CFB213 | CAUAGCAGUGGAAAGAGAU |
| 214 | CFB214 | CCAUUCACUUGGCAGGUGC |
| 215 | CFB215 | CAUUGAUGUUCACUUGGUU |
| 216 | CFB216 | UCAGCCAGGGCAGCACUUG |
| 217 | CFB217 | GCUCAGUGUCCAAGCUGAA |
| 218 | CFB218 | UCAGAGACUGGCUUUCAUC |
| 219 | CFB219 | CAUCCAGAUAAUCCUCCCU |
| 220 | CFB220 | CCUUCUCAAUUAAGUUGAC |
| 221 | CFB221 | UCCAGACCUAGACCUGGUC |
| 222 | CFB222 | GCAACGUCAUAGUCAUAAA |
| 223 | CFB223 | CUUGAAUGAAACGACUUCU |
| 224 | CFB224 | UCCUCCUCAGACACAAACA |
| 225 | CFB225 | GAAGCCAAAGCAUUGAUGU |
| 226 | CFB226 | AUGAAACGACUUCUCUUGU |
| 227 | CFB227 | CAACUUGUGGUCUUCAUAA |
| 228 | CFB228 | ACCAGGUAGAUGUUCAUGG |
| 229 | CFB229 | UCUGUGUUCUGGCACCUGC |
| 230 | CFB230 | UAACUUGCCACCUUCUCAA |
| 231 | CFB231 | UGCCAUGGUUGCUUGUGGU |
| 232 | CFB232 | AGACAAAUGGGCCUGAUAG |
| 233 | CFB233 | UAAGUUGACUAGACACUUU |
| 234 | CFB234 | ACAUGGCGGGUGCGGUUCC |
| 235 | CFB235 | CCCGGAUCUCAUCAAUGAC |
| 236 | CFB236 | GGAGGAAGCCUCAAAGCUC |
| 237 | CFB237 | GACUUUGAACACAUGUUGC |
| 238 | CFB238 | UCUCCUCCUCAGACACAAA |
| 239 | CFB239 | CAGGAAGGCUCCGUCCCGC |
| 240 | CFB240 | CCGCCAGAAUCACCUCUGC |
| 241 | CFB241 | UGGAAAGAGAUCUCAUCAC |
| 242 | CFB242 | CAAGUCCCGGAUCUCAUCA |
| 243 | CFB243 | UGAGCUUGAUCAGGGCAAC |
| 244 | CFB244 | UGUUGCUCAUUGUCUUUCU |
| 245 | CFB245 | UUGCUUGUGGUAAUCGGUA |
| 246 | CFB246 | CUCAUCACUCACAUUGUAG |
| 247 | CFB247 | UCAGUGUCCAAGCUGAAAC |
| 248 | CFB248 | CCCAUUCUUGAUGUAGACC |
| 249 | CFB249 | AAACAAUGUGCUGCUGUCA |
| 250 | CFB250 | UGACUUCAACUUGUGGUCU |
| 251 | 13(5) as | UUGCCACAGAGACUCAGAG |
| 252 | 106-13(4) as | UUGAAUGAAACGACUUCUC |

[0315] The first nucleobase on the terminal 5′ position (the sequences in the table are presented from a 5′(Ieft) to a 3′(right direction) can be freely selected from U, A, G and C instead of the nucleobase disclosed in the table.

TABLE 1b
Nucleobase sequences of the CFB sense strands of
252 constructs

| SEQ | Experimental | 15 mer, 14 mer or |
|---|---|---|
| ID NO. | Label | 11 mer Sense |
| 253 | CFB01 | GAUUUGGGUUUUCUA |
| 254 | CFB02 | GAUGGAUCAGACAGC |
| 255 | CFB03 | CUCUGUGGCAUGGUU |
| 256 | CFB04 | GGUGCUAGAUGGAUC |
| 257 | CFB05 | GAGGAUUUGGGUUUU |
| 258 | CFB06 | CUGGUGCUAGAUGGA |
| 259 | CFB07 | AGGAUUUGGGUUUUC |
| 260 | CFB08 | UAGAUGGAUCAGACA |
| 261 | CFB09 | AUGAGGAUUUGGGUU |
| 262 | CFB10 | UGGUGCUAGAUGGAU |
| 263 | CFB11 | UGAGGAUUUGGGUUU |
| 264 | CFB12 | GUCUCUGUGGCAUGG |
| 265 | CFB13 | GAGUCUCUGUGGCAU |
| 266 | CFB14 | CGCCAUGUCAUCAUC |
| 267 | CFB15 | GUCAAGGAUAUGGAA |
| 268 | CFB16 | AUUCAAGUUGGUGUA |
| 269 | CFB17 | UGAGUCUCUGUGGCA |
| 270 | CFB18 | UCUCUGUGGCAUGGU |
| 271 | CFB19 | CCUGGUGCUAGAUGG |
| 272 | CFB20 | UCAAGGAUAUGGAAA |
| 273 | CFB21 | GUGCUAGAUGGAUCA |
| 274 | CFB22 | CUGAGUCUCUGUGGC |
| 275 | CFB23 | UGCUAGAUGGAUCAG |
| 276 | CFB24 | ACUCGGAAGGAGGUC |
| 277 | CFB25 | CUAGAUGGAUCAGAC |
| 278 | CFB26 | CCUUCCUGCCAAGAC |
| 279 | CFB27 | UACCUGGUGCUAGAU |
| 280 | CFB28 | GUGUCUGAGUACUUU |
| 281 | CFB29 | AGAUGGAUCAGACAG |
| 282 | CFB30 | ACCUGGUGCUAGAUG |
| 283 | CFB31 | AAGAUGAGGAUUUGG |
| 284 | CFB32 | AAUUUUAUGACUAUG |
| 285 | CFB33 | CAUGUCAUCAUCCUC |
| 286 | CFB34 | CAGAACACAGAUUGU |
| 287 | CFB35 | CCUGAUCAAGCUCAA |
| 288 | CFB36 | GAUCUCUUUCCACUG |
| 289 | CFB37 | CUCCAUGAACAUCUA |
| 290 | CFB38 | CAACUACCACUUGCC |
| 291 | CFB39 | CAAGUUAUGGUGUGA |
| 292 | CFB40 | GAUGAGAUCUCUUUC |
| 293 | CFB41 | AGACCACAAGUUGAA |
| 294 | CFB42 | AAGAGAAGUCGUUUC |
| 295 | CFB43 | CAUAUGCCACAUACC |
| 296 | CFB44 | CUUCCAAGAAAGACA |
| 297 | CFB45 | GGAUUAUCUGGAUGU |
| 298 | CFB46 | UAUGACAAAGUCAAG |
| 299 | CFB47 | UAGGUCUGGAGUUUC |
| 300 | CFB48 | AGGUGGCAAGUUAUG |
| 301 | CFB49 | AUUUUAUGACUAUGA |
| 302 | CFB50 | CUUCACAGGAGCCAA |
| 303 | CFB51 | UGUCUGAGUACUUUG |
| 304 | CFB52 | GAAAGACAAUGAGCA |
| 305 | CFB53 | AUUCCUGAAUUUUAU |
| 306 | CFB54 | CAGGCCAAGAUCUCA |
| 307 | CFB55 | UGAGAGAGAUGCUCA |
| 308 | CFB56 | CUGCUAUGACGGUUA |
| 309 | CFB57 | GAUAUCAAAGCUCUG |
| 310 | CFB58 | CAGCAGCACAUUGUU |
| 311 | CFB59 | CUUCUACCCGUACCC |
| 312 | CFB60 | CAGGUCUAGGUCUGG |
| 313 | CFB61 | AGUUCACAAGAGAAG |
| 314 | CFB62 | CAGGAAUUCCUGAAU |
| 315 | CFB63 | UAUGGAAAACCUGGA |
| 316 | CFB64 | UUUCAUUCAAGUUGG |
| 317 | CFB65 | GCUGACAGCAGCACA |
| 318 | CFB66 | CUCGGAAGGAGGUCU |
| 319 | CFB67 | AGUCAACUUAAUUGA |
| 320 | CFB68 | CGGCGAACGUGUCAG |
| 321 | CFB69 | CAAGAAAGACAAUGA |
| 322 | CFB70 | UUCAUUCAAGUUGGU |
| 323 | CFB71 | CUGAGUACUUUGUGC |
| 324 | CFB72 | CACCUACCACUGCAG |
| 325 | CFB73 | CAUCAUCCUCAUGAC |
| 326 | CFB74 | GACCACAAGUUGAAG |
| 327 | CFB75 | CUUCCUCCAACUACC |
| 328 | CFB76 | CAGUGUACAGCAUGA |
| 329 | CFB77 | UUCCAAGAAAGACAA |
| 330 | CFB78 | CAUAGAAGGAGUCGA |
| 331 | CFB79 | AUUAUCUGGAUGUCU |
| 332 | CFB80 | AGGCCAAGAUCUCAG |
| 333 | CFB81 | CUUGAAGACAGCGUC |
| 334 | CFB82 | AAGCUUUCCUGUCUU |
| 335 | CFB83 | CAACAUGUGUUCAAA |
| 336 | CFB84 | UUCCUGAAUUUUAUG |
| 337 | CFB85 | GAUGAGGAUUUGGGU |
| 338 | CFB86 | UGAUGAGAUCUCUUU |
| 339 | CFB87 | AACAUCAAUGCUUUG |
| 340 | CFB88 | AAGCAGGAAUUCCUG |
| 341 | CFB89 | CAAGACUCCUUCAUG |
| 342 | CFB90 | GGUGGCCGAAGCUUU |
| 343 | CFB91 | CUAUGACAAAGUCAA |
| 344 | CFB92 | AGUUUCAGCUUGGAC |
| 345 | CFB93 | AGAUGAGGAUUUGGG |
| 346 | CFB94 | AAUUAAAACAGCUGC |
| 347 | CFB95 | CAAGAGAAGUCGUUU |
| 348 | CFB96 | CUUGGAUGUUCCGGG |
| 349 | CFB97 | UGUCUAUGUGUUUGG |
| 350 | CFB98 | AGUUAUGGUGUGAAG |
| 351 | CFB99 | UAGUUCACAAGAGAA |
| 352 | CFB100 | AGGAAUUCCUGAAUU |
| 353 | CFB101 | UGGGUCAAAGUGUCU |
| 354 | CFB102 | AAGCUCUGUUUGUGU |
| 355 | CFB103 | CAAAGCUCUGUUUGU |
| 356 | CFB104 | AGGAGAAACUCCAAG |
| 357 | CFB105 | AAGUUAUGGUGUGAA |
| 358 | CFB106 | AGUCGUUUCAUUCAA |
| 359 | CFB107 | AUAUGGAAAACCUGG |
| 360 | CFB108 | UGUGAGAGAGAUGCU |
| 361 | CFB109 | GAUUAUCUGGAUGUC |
| 362 | CFB110 | GAGGGAACAACUCGA |
| 363 | CFB111 | UGAGCAACAUGUGUU |
| 364 | CFB112 | CAACUUAAUUGAGAA |
| 365 | CFB113 | AAUGCUUUGGCUUCC |
| 366 | CFB114 | UCUCUUUCCACUGCU |
| 367 | CFB115 | CCUCCAGGCAGUGUA |
| 368 | CFB116 | UGUGACCAGGUCUAG |
| 369 | CFB117 | UCUGUUUGUGUCUGA |
| 370 | CFB118 | UGAAGGAGAAACUCC |
| 371 | CFB119 | UGACAGCAGCACAUU |
| 372 | CFB120 | AUAUCAAAGCUCUGU |
| 373 | CFB121 | CUGCACAGGAUAUCA |
| 374 | CFB122 | UAUGACGUUGCCCUG |
| 375 | CFB123 | CCAGGUCUAGGUCUG |
| 376 | CFB124 | GGUGUCUGAGUACUU |
| 377 | CFB125 | CGGGACGGAGCCUUC |
| 378 | CFB126 | CUAUGACGUUGCCCU |
| 379 | CFB127 | UUGAAUUAAAACAGC |
| 380 | CFB128 | GUGAUGAGAUCUCUU |
| 381 | CFB129 | CAAUUAUGAAGACCA |
| 382 | CFB130 | GAAGCCAAGAUAUGG |
| 383 | CFB131 | CAUUCAAGUUGGUGU |
| 384 | CFB132 | GAAUUAAAACAGCUG |
| 385 | CFB133 | AAGGUGGCAAGUUAU |
| 386 | CFB134 | CAGGUACCUGCUCAC |
| 387 | CFB135 | GAGGUCUACAUCAAG |
| 388 | CFB136 | AACUACCACUUGCCA |
| 389 | CFB137 | GCUUUGAGGCUUCCU |
| 390 | CFB138 | CAAUUACUGUCAUUG |
| 391 | CFB139 | AACAUGUGUUCAAAG |
| 392 | CFB140 | CAAGAUGAGGAUUUG |
| 393 | CFB141 | GAAGGAGAAACUCCA |
| 394 | CFB142 | GGUGGCAAGUUAUGG |
| 395 | CFB143 | UGAAUUAAAACAGCU |
| 396 | CFB144 | AACAACUCGAGCUUU |
| 397 | CFB145 | ACUAUGACGUUGCCC |
| 398 | CFB146 | UGGAAAACCUGGAAG |
| 399 | CFB147 | AUGGAAAACCUGGAA |
| 400 | CFB148 | AUUGCACAACAUGGG |
| 401 | CFB149 | AAGUCAAGGAUAUGG |
| 402 | CFB150 | UGUGUUCAAAGUCAA |
| 403 | CFB151 | AACUCCAAGAUGAGG |
| 404 | CFB152 | CAAUGAGCAACAUGU |
| 405 | CFB153 | UCAUUCAAGUUGGUG |
| 406 | CFB154 | AGACAGCGAUCUGUG |
| 407 | CFB155 | AAAGGCAGCUGUGAG |
| 408 | CFB156 | UGAUUCUGGCGGCCC |
| 409 | CFB157 | GAGUUUCAGCUUGGA |
| 410 | CFB158 | GUUGCCCUGAUCAAG |
| 411 | CFB159 | CAUGGUUUGGGAACA |
| 412 | CFB160 | CGGCAAAAGCAGGUA |
| 413 | CFB161 | AAGACAAUGAGCAAC |
| 414 | CFB162 | CAGCGGCGAACGUGU |
| 415 | CFB163 | CUACAUCAAGAAUGG |
| 416 | CFB164 | CUGAUCAAGCUCAAG |
| 417 | CFB165 | UCUACAUCAAGAAUG |
| 418 | CFB166 | CCAAGACUCCUUCAU |
| 419 | CFB167 | UGGUGUGAAGCCAAG |
| 420 | CFB168 | UGUGAAGCCAAGAUA |
| 421 | CFB169 | AAGGCAGCUGUGAGA |
| 422 | CFB170 | UCAGACAGCAUUGGG |
| 423 | CFB171 | UGUGACCACCACUCC |
| 424 | CFB172 | GAGUGAGUCCCUAUG |
| 425 | CFB173 | CAAGUUGAAGUCAGG |
| 426 | CFB174 | AACUUAAUUGAGAAG |
| 427 | CFB175 | CUGAAGGAGAAACUC |
| 428 | CFB176 | AGGAUAUCAAAGCUC |
| 429 | CFB177 | CAAAGUCAAGGACAU |
| 430 | CFB178 | CAGACACGUACCUGC |
| 431 | CFB179 | GCAGCACAUUGUUUC |
| 432 | CFB180 | CCUGCACAGGAUAUC |
| 433 | CFB181 | CCAGUCUCUGAGUCU |
| 434 | CFB182 | AAUUACUGUCAUUGA |
| 435 | CFB183 | CAGGAAGGUGGCUCU |
| 436 | CFB184 | UGUUCAAAGUCAAGG |
| 437 | CFB185 | AGAAGUCGUUUCAUU |
| 438 | CFB186 | GCUUUCCUGUCUUCC |
| 439 | CFB187 | CAGGAUAUCAAAGCU |
| 440 | CFB188 | GAUCAAGCUCAAGAA |
| 441 | CFB189 | GUGCAGAGCAAUCCA |
| 442 | CFB190 | AGAUGCUCAAUAUGC |
| 443 | CFB191 | UCAAAGUCAAGGAUA |
| 444 | CFB192 | UAGUGGAUGUCUGCA |
| 445 | CFB193 | UCGGAAGGAGGUCUA |
| 446 | CFB194 | UUAAUUGAGAAGGUG |
| 447 | CFB195 | UCCUUCCGACUUCUC |
| 448 | CFB196 | CCGUACCCUGUGCAG |
| 449 | CFB197 | CCAAUUACUGUCAUU |
| 450 | CFB198 | AGUCAGGGACUAACA |
| 451 | CFB199 | AAAGUCAAGGAUAUG |
| 452 | CFB200 | GUGCAGACACGUACC |
| 453 | CFB201 | UACUUUGUGCUGACA |
| 454 | CFB202 | AAUUAUGAAGACCAC |
| 455 | CFB203 | UCUCUGAGUCUCUGU |
| 456 | CFB204 | UAUCUGGAUGUCUAU |
| 457 | CFB205 | UGACUCGGAAGGAGG |
| 458 | CFB206 | CUUCAGGCUCCAUGA |
| 459 | CFB207 | AGUGACAUAUGCCAC |
| 460 | CFB208 | GAACAUCAAUGCUUU |
| 461 | CFB209 | ACUGGAGGAGUGAGU |
| 462 | CFB210 | AAGUCAAGGACAUCU |
| 463 | CFB211 | AUUGAAUUAAAACAG |
| 464 | CFB212 | UCCAUGAACAUCUAC |
| 465 | CFB213 | CUUUCCACUGCUAUG |
| 466 | CFB214 | CUGCCAAGUGAAUGG |
| 467 | CFB215 | AAGUGAACAUCAAUG |
| 468 | CFB216 | UGCUGCCCUGGCUGA |
| 469 | CFB217 | GCUUGGACACUGAGC |
| 470 | CFB218 | AAAGCCAGUCUCUGA |
| 471 | CFB219 | AGGAUUAUCUGGAUG |
| 472 | CFB220 | ACUUAAUUGAGAAGG |
| 473 | CFB221 | AGGUCUAGGUCUGGA |
| 474 | CFB222 | UGACUAUGACGUUGC |
| 475 | CFB223 | GUCGUUUCAUUCAAG |
| 476 | CFB224 | UGUGUCUGAGGAGGA |
| 477 | CFB225 | CAAUGCUUUGGCUUC |
| 478 | CFB226 | GAGAAGUCGUUUCAU |
| 479 | CFB227 | GAAGACCACAAGUUG |
| 480 | CFB228 | GAACAUCUACCUGGU |
| 481 | CFB229 | GUGCCAGAACACAGA |
| 482 | CFB230 | GAAGGUGGCAAGUUA |
| 483 | CFB231 | CAAGCAACCAUGGCA |
| 484 | CFB232 | CAGGCCCAUUUGUCU |
| 485 | CFB233 | UGUCUAGUCAACUUA |
| 486 | CFB234 | CCGCACCCGCCAUGU |
| 487 | CFB235 | UUGAUGAGAUCCGGG |
| 488 | CFB236 | UUUGAGGCUUCCUCC |
| 489 | CFB237 | CAUGUGUUCAAAGUC |
| 490 | CFB238 | UGUCUGAGGAGGAGA |
| 491 | CFB239 | GACGGAGCCUUCCUG |
| 492 | CFB240 | AGGUGAUUCUGGCGG |
| 493 | CFB241 | UGAGAUCUCUUUCCA |
| 494 | CFB242 | GAGAUCCGGGACUUG |
| 495 | CFB243 | CCCUGAUCAAGCUCA |
| 496 | CFB244 | AGACAAUGAGCAACA |
| 497 | CFB245 | GAUUACCACAAGCAA |
| 498 | CFB246 | AAUGUGAGUGAUGAG |
| 499 | CFB247 | CAGCUUGGACACUGA |
| 500 | CFB248 | UACAUCAAGAAUGGG |
| 501 | CFB249 | AGCAGCACAUUGUUU |
| 502 | CFB250 | CACAAGUUGAAGUCA |
| 503 | 13(5) s | AGUCUCUGUGGCAA |
| 504 | 106-13(4) s | GUUUCAUUCAA |
| 505 | 24151 | ACACAGUUUGGCCUGGAGA |
| 506 | 24152 | GGAAUCUUGAAGUCAGGAA |
| 507 | 24153 | CUGGGCUUGUAGCUGGCAC |
| 508 | 24154 | UCAAGUAAUUAUAGUGAGU |
| 509 | 24155 | AAACAGGUUUGUCUGUAUG |

TABLE 1c
Nucleobse sequences of the C5
antisense strands of 250 constructs

| SEQ ID NO. | Antisense ID | 19mer Antisense |
|---|---|---|
| 510 | 24156 | GCAGACAUUUUAACACAGA |
| 511 | 24157 | ACCUGGAGCUGGUUGCCAC |
| 512 | 24158 | GAUAAAAUCAAGUAAUUAU |
| 513 | 24159 | GACACAGUUUGGCCUGGAG |
| 514 | 24160 | CGGAAUCUUGAAGUCAGGA |
| 515 | 24161 | AGACAUUUUAACACAGAAC |
| 516 | 24162 | UGAAGUCAGGAAAAGAGAU |
| 517 | 24163 | CACAGUUUGGCCUGGAGAA |
| 518 | 24164 | AAUUAUAGUGAGUUAUUUU |
| 519 | 24165 | UCCAAGUCAGAUGUCUCUU |
| 520 | 24166 | UCAGGAAAAGAGAUAAUUC |
| 521 | 24167 | GGCAAGACAUAUUCUUUAA |
| 522 | 24168 | GAAGGCCAAUUUCCAGAGG |
| 523 | 24169 | CAAGUAAUUAUAGUGAGUU |
| 524 | 24170 | AUAAAAUCAAGUAAUUAUA |
| 525 | 24171 | AUCAAGUAAUUAUAGUGAG |
| 526 | 24172 | GCCAAUUUCCAGAGGAAGC |
| 527 | 24173 | AGUAAUUAUAGUGAGUUAU |
| 528 | 24174 | UAAAGGUACUUGUUGUUUA |
| 529 | 24175 | GACUGCUGUUUCAGAAUCA |
| 530 | 24176 | ACUGCUGUUUCAGAAUCAA |
| 531 | 24177 | AUAUAAAGGUACUUGUUGU |
| 532 | 24178 | UGUAAACAGUUCCUUUCAA |
| 533 | 24179 | GGUAACUUUGGCUGAGAGA |
| 534 | 24180 | UAUAGUUGUAAACAGUUCC |
| 535 | 24181 | ACAUAUUCUUUAACUUCAA |
| 536 | 24182 | AAGCAGUCCUUUUACACUC |
| 537 | 24183 | UAGUGAGUUAUUUUGUCAA |
| 538 | 24184 | AGGAAGACAUCUUUGAACA |
| 539 | 24185 | GCAGUCCUUUUACACUCAA |
| 540 | 24186 | AGUUAUUUUGUCAAUAUAU |
| 541 | 24187 | GUACAACAGAAUAUGGUAU |
| 542 | 24188 | GUUAUUUUGUCAAUAUAUG |
| 543 | 24189 | CAGGCUUCAGGAAAAGAGG |
| 544 | 24190 | AGGAAAAGAGAUAAUUCCA |
| 545 | 24191 | UGUUACAGCAAUAUAAAGG |
| 546 | 24192 | UAUAAGCAUAUGCAAUCUC |
| 547 | 24193 | CAUAUUCUUUAACUUCAAA |
| 548 | 24194 | AAGACAUCUUUGAACACCU |
| 549 | 24195 | CCAGGAAGACAUCUUUGAA |
| 550 | 24196 | UACAGCAAUAUAAAGGUAC |
| 551 | 24197 | CAUUGUCAUAGGUUAUUGG |
| 552 | 24198 | UGAGUUAUUUUGUCAAUAU |
| 553 | 24199 | AGUGAGUUAUUUUGUCAAU |
| 554 | 24200 | GUGAGUUAUUUUGUCAAUA |
| 555 | 24201 | GAAUUUUCCUUGAAAGAUC |
| 556 | 24202 | ACUGUUACAGCAAUAUAAA |
| 557 | 24203 | AAAUCCAUUGUCAUAGGUU |
| 558 | 24204 | AAUCCAUUGUCAUAGGUUA |
| 559 | 24205 | GAGAAAUCCAUUGUCAUAG |
| 560 | 24206 | AAGACAUAUUCUUUAACUU |
| 561 | 24207 | AAGUGCAGAUUCCCUCCAC |
| 562 | 24208 | AUCCAUUGUCAUAGGUUAU |
| 563 | 24209 | AGACAUCUUUGAACACCUU |
| 564 | 24210 | CCAUUGUCAUAGGUUAUUG |
| 565 | 24211 | UGAAGAGAAAUCCAUUGUC |
| 566 | 24212 | GACAUAUUCUUUAACUUCA |
| 567 | 24213 | CAGUCCUUUUACACUCAAA |
| 568 | 24214 | AAUUUUCCUUGAAAGAUCC |
| 569 | 24215 | UGAAAUUGUAUUUUAUCUG |
| 570 | 24216 | AGUAAUUUCAAAAUUCUUA |
| 571 | 24217 | CAAAAUUCUUAAAGUUCUU |
| 572 | 24218 | UGAAUUUUGGUUCUGCUCU |
| 573 | 24219 | UGUCAUUUUAUAAUUAUGU |
| 574 | 24220 | CCAAAUCCUGUACUGACAA |
| 575 | 24221 | GGAUAACUUUUAAUAGAGA |
| 576 | 24222 | UUUAAGUCUUCUCUUAUUC |
| 577 | 24223 | GAUAAUUCCAAUAUGAUCA |
| 578 | 24224 | GGAUAAAUGAACAUGGCCU |
| 579 | 24225 | CAAGGUUCAUCAUUUUCUU |
| 580 | 24226 | UGGAAGUGCUAUAAAACAU |
| 581 | 24227 | CCAAGUACUCUUAAAGCAA |
| 582 | 24228 | UCCAAUGAUUUCCUGUUUC |
| 583 | 24229 | UAUGGUAUAUUCAUUUCCA |
| 584 | 24230 | GAACAAGAUGAACUUCCCA |
| 585 | 24231 | UGAACUUCAGGAAUUUUAG |
| 586 | 24232 | AAGUCUUCUCUUAUUCCAA |
| 587 | 24233 | GAAUGUUUAUACUUUGAUA |
| 588 | 24234 | CCGGAAUCGUACACAAAGG |
| 589 | 24235 | CAUACCUCUGCUCUUCUGA |
| 590 | 24236 | GAUCAAUUUCUUCUACCAU |
| 591 | 24237 | CAACAUUGUGUUUUGCAUU |
| 592 | 24238 | UAACUUUAUAAGCAUAUGC |
| 593 | 24239 | CAGGAUAACUUUUAAUAGA |
| 594 | 24240 | UUUUAUUGGUUGAUACUGU |
| 595 | 24241 | UGCAACUGUUUUCUUCUGG |
| 596 | 24242 | UGCUUUGAUACAACUUCCA |
| 597 | 24243 | CCAAAGCUUCUCUCUUCAA |
| 598 | 24244 | GGGAACUCCUUUCGUCUGC |
| 599 | 24245 | UAUGACAGUUCUUUGACUG |
| 600 | 24246 | UUGCAGAAUAACAUGUCCA |
| 601 | 24247 | CAGAAGUCCUAUAGUUGUA |
| 602 | 24248 | GAUAACUUUUAAUAGAGAU |
| 603 | 24249 | ACUAAGAUUUCUUUUCCAA |
| 604 | 24250 | GAUAAAUGAACAUGGCCUG |
| 605 | 24251 | GAUGAACAUGUUGUGUCUC |
| 606 | 24252 | UGAUCAUCUUUUAAGUCUU |
| 607 | 24253 | GAGCAAUUCCAUUUAUCAA |
| 608 | 24254 | UGUGAAUUUUCCUUGAAAG |
| 609 | 24255 | UCAAAAUUCUUAAAGUUCU |
| 610 | 24256 | UAAACUCCAGCACCGUCAC |
| 611 | 24257 | UUGAUAUUGGAAGUGCUAU |
| 612 | 24258 | GUGCAUUCAGUGUUACUGG |
| 613 | 24259 | AAUGUUUAUACUUUGAUAA |
| 614 | 24260 | AAAUUGUAUUUUAUCUGGA |
| 615 | 24261 | UAAGUCUUCUCUUAUUCCA |
| 616 | 24262 | AGAAGUCCUAUAGUUGUAA |
| 617 | 24263 | CUUGCUUUUAUAGUAAUUU |
| 618 | 24264 | UCAACAUUGUGUUUUGCAU |
| 619 | 24265 | AGGCAGUUGUUUCUACCAU |
| 620 | 24266 | UAUGAUCAAUUUCUUCUAC |
| 621 | 24267 | GUAAUUUCAAAAUUCUUAA |
| 622 | 24268 | AUCAACAUUGUGUUUUGCA |
| 623 | 24269 | CAAAGUAUUCCCAAAAGGC |
| 624 | 24270 | AAAACAUGGUACACUGUUU |
| 625 | 24271 | ACACAGAACUGCAUCCCAG |
| 626 | 24272 | UCCAAGUACUCUUAAAGCA |
| 627 | 24273 | UGUAGUAUGACAGUUCUUU |
| 628 | 24274 | CAGAAUAGCUUUCCCUUUU |
| 629 | 24275 | GCUUUUAUAGUAAUUUCAA |
| 630 | 24276 | GAAGCUACUCCAUCAUCAA |
| 631 | 24277 | UGCCACUAAUUCUAAGUAA |
| 632 | 24278 | GUAGACUCUAUGACUGUUA |
| 633 | 24279 | CUAAGAUUUCUUUUCCAAA |
| 634 | 24280 | CAAUAUUUAACCAGACUGA |
| 635 | 24281 | UAGUAAUUUCAAAAUUCUU |
| 636 | 24282 | GGAAAAGAGAUAAUUCCAA |
| 637 | 24283 | AAAAUGCUUGACACGAUGA |
| 638 | 24284 | UAUAUUCAUUUCCAGGAAG |
| 639 | 24285 | UAAUAAAAGCAAGUGCCAC |
| 640 | 24286 | UACUAUGCGUUUGUAAUCA |
| 641 | 24287 | GAAUUGAAAUACUCUUUCC |
| 642 | 24288 | UCAGGAUAACUUUUAAUAG |
| 643 | 24289 | UACAACUUCCAAAUACACA |
| 644 | 24290 | AAUCAUUCUCUAAUAAAAG |
| 645 | 24291 | GAAUAGCUUUCCCUUUUGA |
| 646 | 24292 | GGAAAUUCUUGUCUGUCAU |
| 647 | 24293 | UUGAAUUUUGGUUCUGCUC |
| 648 | 24294 | AGUGAGCUUUACAAAUAAG |
| 649 | 24295 | AAACAUGGUACACUGUUUA |
| 650 | 24296 | UAGACUCUAUGACUGUUAC |
| 651 | 24297 | UUUUCUUGGGAGUCAUCUG |
| 652 | 24298 | GUAGGCAAGGAGAUGUCCA |
| 653 | 24299 | AAAGCCACCUCCAUACCUC |
| 654 | 24300 | UAAGAUUUCUUUUCCAAAC |
| 655 | 24301 | AAAGCUGCAAACUUCCUCA |
| 656 | 24302 | UCUAAUAAAAGCAAGUGCC |
| 657 | 24303 | CAAUUGUUUGUGCAUUCAG |
| 658 | 24304 | ACCAAAGCUUCUCUCUUCA |
| 659 | 24305 | GCAACUGUUUUCUUCUGGG |
| 660 | 24306 | AUGCUUUGAUACAACUUCC |
| 661 | 24307 | AAUUCAUCUAAAUUAGCUA |
| 662 | 24308 | UGUGACGAUGUAAUAGACC |
| 663 | 24309 | GGUACACUGUUUAUCUGGU |
| 664 | 24310 | GGUUGCCUUGUACUUGACA |
| 665 | 24311 | CCAAGGAAAUUCUUGUCUG |
| 666 | 24312 | UUAACCAGACUGAAUCAGA |
| 667 | 24313 | UAGCAGCUAUUUCUUCUAU |
| 668 | 24314 | CCAGUUUUGUAGAUAUCCA |
| 669 | 24315 | AAUGAUUUCCUGUUUCCAG |
| 670 | 24316 | AGACAAGAUCUCACCUACA |
| 671 | 24317 | GUGGAUUACCUUUAACCAA |
| 672 | 24318 | UGAUACUGUGAAUUUUCCU |
| 673 | 24319 | AAUACUGGGACAACGCUCA |
| 674 | 24320 | CAUAAUUAAGUACUGUCUU |
| 675 | 24321 | CAAACUUCCUCAGAGGUAC |
| 676 | 24322 | AAGGCCAUGUUAUUUCAGA |
| 677 | 24323 | UGCAAACUGUAUGCAGCUG |
| 678 | 24324 | AGAAUAGCUUUCCCUUUUG |
| 679 | 24325 | UACUGUGAAUUUUCCUUGA |
| 680 | 24326 | CCAACUUCAAAGAGUUCAA |
| 681 | 24327 | CUGAAUUUUGAUAUUGGAA |
| 682 | 24328 | AAAGGCUGUAAGAUAUAAG |
| 683 | 24329 | UUGCUUUUAUAGUAAUUUC |
| 684 | 24330 | GUCCAAGUACUCUUAAAGC |
| 685 | 24331 | ACACUAAUUCUGCUGUCUG |
| 686 | 24332 | CUGGCUUGCUUACUGGUAA |
| 687 | 24333 | GUUGCCUUGUACUUGACAA |
| 688 | 24334 | CAGCAUUUCUGUAGGACAU |
| 689 | 24335 | UUAUACUUUGAUAAGAUGC |
| 690 | 24336 | UUAAGUACUGUCUUCCUUU |
| 691 | 24337 | CUGCAAACUUCCUCAGAGG |
| 692 | 24338 | AAGACAGUUUCUCUUUUGG |
| 693 | 24339 | AUUCAGUUUGUAGGGAGAG |
| 694 | 24340 | UGGAAUGUUUAUACUUUGA |
| 695 | 24341 | UAACAGGGUCUUCAUGUGU |
| 696 | 24342 | AGAGAUUGUUGCAUCAAAU |
| 697 | 24343 | GAGUCAUCUGCAUUUGCAU |
| 698 | 24344 | GAAUGUUUAUAUUUAGCAG |
| 699 | 24345 | GGAACAAGAUGAACUUCCC |
| 700 | 24346 | GGUAUUUCUGCCUCUUCAG |
| 701 | 24347 | CAGAACUGCAUCCCAGAAG |
| 702 | 24348 | UUCCGGUGUCCAAUAACCU |
| 703 | 24349 | CAUCAAUUGUUUGUGCAUU |
| 704 | 24350 | AAUACUCUUUCCAAGGGCU |
| 705 | 24351 | UCAAAUGCUUCAGUGUAUC |
| 706 | 24352 | AAGCAAGUGCCACUAAUUC |
| 707 | 24353 | UUAAUAGAGAUUGUUGCAU |
| 708 | 24354 | AUAGAGAUUGUUGCAUCAA |
| 709 | 24355 | GAACUCCUUUCGUCUGCUA |
| 710 | 24356 | GUCAUUUUAUAAUUAUGUA |
| 711 | 24357 | AAGAAUUGAAAUACUCUUU |
| 712 | 24358 | AAAGCCUUUCUAAUUCCAA |
| 713 | 24359 | UCAAUAUUUAACCAGACUG |
| 714 | 24360 | UGGUAUAUUCAUUUCCAGG |
| 715 | 24361 | UGAAACAAUUGAACGAAAC |
| 716 | 24362 | AAUAUCUUGCUUUUAUAGU |
| 717 | 24363 | AGAGAUUGUCAGAUCCAAU |
| 718 | 24364 | AGCAAUUCCAUUUAUCAAC |
| 719 | 24365 | UUAUCAGGAUAACUUUUAA |
| 720 | 24366 | CGAAUUUCUGGCUUGCUUA |
| 721 | 24367 | UCAAGUUCAGACUGGUGAG |
| 722 | 24368 | AGAGGUACUGGUUUUGUGA |
| 723 | 24369 | GGUAUUUUCUUUCAAGCAA |
| 724 | 24370 | AGGUACUGGUUUUGUGAAC |
| 725 | 24371 | CAGAUUCCCUCCACAGCAG |
| 726 | 24372 | UAGUCAGCAUUUCUGUAGG |
| 727 | 24373 | AUUAGCACGGAGCUGGCUU |
| 728 | 24374 | UAAGAGACACAGUUUGGCC |
| 729 | 24375 | GAACAUGUUGUGUCUCUAG |
| 730 | 24376 | CAUAAGUGCAAACUGUAUG |
| 731 | 24377 | CAAAUUCAGUUUGUAGGGA |
| 732 | 24378 | ACAAGCAGUCCUUUUACAC |
| 733 | 24379 | AAGUAUUCCCAAAAGGCCC |
| 734 | 24380 | CAAUCACAGUAAAGGCUGU |
| 735 | 24381 | AAUAGCUUUCCCUUUUGAC |
| 736 | 24382 | UAUUGGUUGAUACUGUGAA |
| 737 | 24383 | CAGAAAUGGCCAAUGUAAA |
| 738 | 24384 | UUGUAAUCAGAGUUUCCGU |
| 739 | 24385 | ACUCAGGCUUUAAUGAUCA |
| 740 | 24386 | CAGCUAUUUCUUCUAUCUU |
| 741 | 24387 | AUAUCUUGCUUUUAUAGUA |
| 742 | 24388 | ACAAGGUUCAUCAUUUUCU |
| 743 | 24389 | AUUGUGUUUUGCAUUGCUG |
| 744 | 24390 | GCCACAAUAAAGAAUUACA |
| 745 | 24391 | GGUGGAUUACCUUUAACCA |
| 746 | 24392 | CUUCUCUCUUCAAAGCUGA |
| 747 | 24393 | UGGGAUGCUUCAAUAUCCU |
| 748 | 24394 | AAAUCUUCUAAACUGUAGU |
| 749 | 24395 | AAAUUCAGUUUGUAGGGAG |
| 750 | 24396 | CUGUCAUUUUAUAAUUAUG |
| 751 | 24397 | AAUGCUUUGAUACAACUUC |
| 752 | 24398 | UCCUCUUUAUAUUUAGCCU |
| 753 | 24399 | GCAAAUUCAUCUAAAUUAG |
| 754 | 24400 | UUCCAAAUACACAUAAGAA |

[0316] The first nucleobase on the terminal 5′ position (the sequences in the table are presented from a 5′(Ieft) to a 3′(right direction) can be freely selected from U, A, G and C instead of the nucleobase disclosed in the table.

TABLE 1d
Nucleobase sequences of the C5
sense strands of 250 constructs

| SEQ ID NO. | Sense ID | 14mer Sense |
|---|---|---|
| 755 | 14151 | AGGCCAAACUGUGU |
| 756 | 14152 | GACUUCAAGAUUCC |
| 757 | 14153 | AGCUACAAGCCCAG |
| 758 | 14154 | CUAUAAUUACUUGA |
| 759 | 14155 | AGACAAACCUGUUU |
| 760 | 14156 | GUUAAAAUGUCUGC |
| 761 | 14157 | AACCAGCUCCAGGU |
| 762 | 14158 | UACUUGAUUUUAUC |
| 763 | 14159 | GGCCAAACUGUGUC |
| 764 | 14160 | ACUUCAAGAUUCCG |
| 765 | 14161 | GUGUUAAAAUGUCU |
| 766 | 14162 | UUUUCCUGACUUCA |
| 767 | 14163 | CAGGCCAAACUGUG |
| 768 | 14164 | AACUCACUAUAAUU |
| 769 | 14165 | ACAUCUGACUUGGA |
| 770 | 14166 | AUCUCUUUUCCUGA |
| 771 | 14167 | GAAUAUGUCUUGCC |
| 772 | 14168 | GGAAAUUGGCCUUC |
| 773 | 14169 | ACUAUAAUUACUUG |
| 774 | 14170 | UUACUUGAUUUUAU |
| 775 | 14171 | UAUAAUUACUUGAU |
| 776 | 14172 | CUCUGGAAAUUGGC |
| 777 | 14173 | UCACUAUAAUUACU |
| 778 | 14174 | AACAAGUACCUUUA |
| 779 | 14175 | CUGAAACAGCAGUC |
| 780 | 14176 | UCUGAAACAGCAGU |
| 781 | 14177 | AAGUACCUUUAUAU |
| 782 | 14178 | AGGAACUGUUUACA |
| 783 | 14179 | CAGCCAAAGUUACC |
| 784 | 14180 | UGUUUACAACUAUA |
| 785 | 14181 | GUUAAAGAAUAUGU |
| 786 | 14182 | UAAAAGGACUGCUU |
| 787 | 14183 | AAAAUAACUCACUA |
| 788 | 14184 | AAAGAUGUCUUCCU |
| 789 | 14185 | UGUAAAAGGACUGC |
| 790 | 14186 | UUGACAAAAUAACU |
| 791 | 14187 | AUAUUCUGUUGUAC |
| 792 | 14188 | AUUGACAAAAUAAC |
| 793 | 14189 | UUUCCUGAAGCCUG |
| 794 | 14190 | UUAUCUCUUUUCCU |
| 795 | 14191 | AUAUUGCUGUAACA |
| 796 | 14192 | UGCAUAUGCUUAUA |
| 797 | 14193 | AGUUAAAGAAUAUG |
| 798 | 14194 | UUCAAAGAUGUCUU |
| 799 | 14195 | AGAUGUCUUCCUGG |
| 800 | 14196 | UUUAUAUUGCUGUA |
| 801 | 14197 | AACCUAUGACAAUG |
| 802 | 14198 | GACAAAAUAACUCA |
| 803 | 14199 | CAAAAUAACUCACU |
| 804 | 14200 | ACAAAAUAACUCAC |
| 805 | 14201 | UUCAAGGAAAAUUC |
| 806 | 14202 | AUUGCUGUAACAGU |
| 807 | 14203 | AUGACAAUGGAUUU |
| 808 | 14204 | UAUGACAAUGGAUU |
| 809 | 14205 | ACAAUGGAUUUCUC |
| 810 | 14206 | AAAGAAUAUGUCUU |
| 811 | 14207 | GGGAAUCUGCACUU |
| 812 | 14208 | CUAUGACAAUGGAU |
| 813 | 14209 | GUUCAAAGAUGUCU |
| 814 | 14210 | ACCUAUGACAAUGG |
| 815 | 14211 | UGGAUUUCUCUUCA |
| 816 | 14212 | UUAAAGAAUAUGUC |
| 817 | 14213 | GUGUAAAAGGACUG |
| 818 | 14214 | UUUCAAGGAAAAUU |
| 819 | 14215 | AAAAUACAAUUUCA |
| 820 | 14216 | AUUUUGAAAUUACU |
| 821 | 14217 | CUUUAAGAAUUUUG |
| 822 | 14218 | AGAACCAAAAUUCA |
| 823 | 14219 | AUUAUAAAAUGACA |
| 824 | 14220 | AGUACAGGAUUUGG |
| 825 | 14221 | AUUAAAAGUUAUCC |
| 826 | 14222 | AGAGAAGACUUAAA |
| 827 | 14223 | AUAUUGGAAUUAUC |
| 828 | 14224 | AUGUUCAUUUAUCC |
| 829 | 14225 | AAUGAUGAACCUUG |
| 830 | 14226 | UUAUAGCACUUCCA |
| 831 | 14227 | UUAAGAGUACUUGG |
| 832 | 14228 | AGGAAAUCAUUGGA |
| 833 | 14229 | AUGAAUAUACCAUA |
| 834 | 14230 | AGUUCAUCUUGUUC |
| 835 | 14231 | AUUCCUGAAGUUCA |
| 836 | 14232 | AUAAGAGAAGACUU |
| 837 | 14233 | AAGUAUAAACAUUC |
| 838 | 14234 | GUGUACGAUUCCGG |
| 839 | 14235 | AGAGCAGAGGUAUG |
| 840 | 14236 | AGAAGAAAUUGAUC |
| 841 | 14237 | AAAACACAAUGUUG |
| 842 | 14238 | UGCUUAUAAAGUUA |
| 843 | 14239 | UAAAAGUUAUCCUG |
| 844 | 14240 | AUCAACCAAUAAAA |
| 845 | 14241 | AGAAAACAGUUGCA |
| 846 | 14242 | GUUGUAUCAAAGCA |
| 847 | 14243 | GAGAGAAGCUUUGG |
| 848 | 14244 | CGAAAGGAGUUCCC |
| 849 | 14245 | AAAGAACUGUCAUA |
| 850 | 14246 | AUGUUAUUCUGCAA |
| 851 | 14247 | CUAUAGGACUUCUG |
| 852 | 14248 | UAUUAAAAGUUAUC |
| 853 | 14249 | AAAGAAAUCUUAGU |
| 854 | 14250 | CAUGUUCAUUUAUC |
| 855 | 14251 | ACAACAUGUUCAUC |
| 856 | 14252 | UUAAAAGAUGAUCA |
| 857 | 14253 | AAAUGGAAUUGCUC |
| 858 | 14254 | AAGGAAAAUUCACA |
| 859 | 14255 | UUUAAGAAUUUUGA |
| 860 | 14256 | GGUGCUGGAGUUUA |
| 861 | 14257 | ACUUCCAAUAUCAA |
| 862 | 14258 | AACACUGAAUGCAC |
| 863 | 14259 | AAAGUAUAAACAUU |
| 864 | 14260 | AUAAAAUACAAUUU |
| 865 | 14261 | UAAGAGAAGACUUA |
| 866 | 14262 | ACUAUAGGACUUCU |
| 867 | 14263 | ACUAUAAAAGCAAG |
| 868 | 14264 | AAACACAAUGUUGA |
| 869 | 14265 | AGAAACAACUGCCU |
| 870 | 14266 | AGAAAUUGAUCAUA |
| 871 | 14267 | AAUUUUGAAAUUAC |
| 872 | 14268 | AACACAAUGUUGAU |
| 873 | 14269 | UUGGGAAUACUUUG |
| 874 | 14270 | GUGUACCAUGUUUU |
| 875 | 14271 | AUGCAGUUCUGUGU |
| 876 | 14272 | UAAGAGUACUUGGA |
| 877 | 14273 | ACUGUCAUACUACA |
| 878 | 14274 | GGAAAGCUAUUCUG |
| 879 | 14275 | AUUACUAUAAAAGC |
| 880 | 14276 | GAUGGAGUAGCUUC |
| 881 | 14277 | UAGAAUUAGUGGCA |
| 882 | 14278 | GUCAUAGAGUCUAC |
| 883 | 14279 | AAAAGAAAUCUUAG |
| 884 | 14280 | CUGGUUAAAUAUUG |
| 885 | 14281 | UUUUGAAAUUACUA |
| 886 | 14282 | AUUAUCUCUUUUCC |
| 887 | 14283 | GUGUCAAGCAUUUU |
| 888 | 14284 | UGGAAAUGAAUAUA |
| 889 | 14285 | ACUUGCUUUUAUUA |
| 890 | 14286 | ACAAACGCAUAGUA |
| 891 | 14287 | GAGUAUUUCAAUUC |
| 892 | 14288 | AAAAGUUAUCCUGA |
| 893 | 14289 | AUUUGGAAGUUGUA |
| 894 | 14290 | AUUAGAGAAUGAUU |
| 895 | 14291 | AGGGAAAGCUAUUC |
| 896 | 14292 | AGACAAGAAUUUCC |
| 897 | 14293 | GAACCAAAAUUCAA |
| 898 | 14294 | UUGUAAAGCUCACU |
| 899 | 14295 | AGUGUACCAUGUUU |
| 900 | 14296 | AGUCAUAGAGUCUA |
| 901 | 14297 | GACUCCCAAGAAAA |
| 902 | 14298 | AUCUCCUUGCCUAC |
| 903 | 14299 | AUGGAGGUGGCUUU |
| 904 | 14300 | GAAAAGAAAUCUUA |
| 905 | 14301 | AAGUUUGCAGCUUU |
| 906 | 14302 | UUGCUUUUAUUAGA |
| 907 | 14303 | UGCACAAACAAUUG |
| 908 | 14304 | AGAGAAGCUUUGGU |
| 909 | 14305 | AAGAAAACAGUUGC |
| 910 | 14306 | UUGUAUCAAAGCAU |
| 911 | 14307 | AAUUUAGAUGAAUU |
| 912 | 14308 | AUUACAUCGUCACA |
| 913 | 14309 | AUAAACAGUGUACC |
| 914 | 14310 | AGUACAAGGCAACC |
| 915 | 14311 | AAGAAUUUCCUUGG |
| 916 | 14312 | UUCAGUCUGGUUAA |
| 917 | 14313 | AGAAAUAGCUGCUA |
| 918 | 14314 | AUCUACAAAACUGG |
| 919 | 14315 | AACAGGAAAUCAUU |
| 920 | 14316 | GUGAGAUCUUGUCU |
| 921 | 14317 | UAAAGGUAAUCCAC |
| 922 | 14318 | AAUUCACAGUAUCA |
| 923 | 14319 | GUUGUCCCAGUAUU |
| 924 | 14320 | AGUACUUAAUUAUG |
| 925 | 14321 | UCUGAGGAAGUUUG |
| 926 | 14322 | AAUAACAUGGCCUU |
| 927 | 14323 | GCAUACAGUUUGCA |
| 928 | 14324 | GGGAAAGCUAUUCU |
| 929 | 14325 | GAAAAUUCACAGUA |
| 930 | 14326 | CUCUUUGAAGUUGG |
| 931 | 14327 | AUAUCAAAAUUCAG |
| 932 | 14328 | AUCUUACAGCCUUU |
| 933 | 14329 | UACUAUAAAAGCAA |
| 934 | 14330 | AAGAGUACUUGGAC |
| 935 | 14331 | AGCAGAAUUAGUGU |
| 936 | 14332 | AGUAAGCAAGCCAG |
| 937 | 14333 | AAGUACAAGGCAAC |
| 938 | 14334 | CUACAGAAAUGCUG |
| 939 | 14335 | UUAUCAAAGUAUAA |
| 940 | 14336 | AAGACAGUACUUAA |
| 941 | 14337 | GAGGAAGUUUGCAG |
| 942 | 14338 | AGAGAAACUGUCUU |
| 943 | 14339 | CCUACAAACUGAAU |
| 944 | 14340 | GUAUAAACAUUCCA |
| 945 | 14341 | UGAAGACCCUGUUA |
| 946 | 14342 | AUGCAACAAUCUCU |
| 947 | 14343 | AAUGCAGAUGACUC |
| 948 | 14344 | AAAUAUAAACAUUC |
| 949 | 14345 | GUUCAUCUUGUUCC |
| 950 | 14346 | GAGGCAGAAAUACC |
| 951 | 14347 | GGGAUGCAGUUCUG |
| 952 | 14348 | AUUGGACACCGGAA |
| 953 | 14349 | ACAAACAAUUGAUG |
| 954 | 14350 | UUGGAAAGAGUAUU |
| 955 | 14351 | ACUGAAGCAUUUGA |
| 956 | 14352 | AGUGGCACUUGCUU |
| 957 | 14353 | ACAAUCUCUAUUAA |
| 958 | 14354 | GCAACAAUCUCUAU |
| 959 | 14355 | GACGAAAGGAGUUC |
| 960 | 14356 | AAUUAUAAAAUGAC |
| 961 | 14357 | GUAUUUCAAUUCUU |
| 962 | 14358 | AUUAGAAAGGCUUU |
| 963 | 14359 | UGGUUAAAUAUUGA |
| 964 | 14360 | AAAUGAAUAUACCA |
| 965 | 14361 | GUUCAAUUGUUUCA |
| 966 | 14362 | AAAAGCAAGAUAUU |
| 967 | 14363 | AUCUGACAAUCUCU |
| 968 | 14364 | UAAAUGGAAUUGCU |
| 969 | 14365 | AGUUAUCCUGAUAA |
| 970 | 14366 | AAGCCAGAAAUUCG |
| 971 | 14367 | CAGUCUGAACUUGA |
| 972 | 14368 | AAACCAGUACCUCU |
| 973 | 14369 | UGAAAGAAAAUACC |
| 974 | 14370 | CAAAACCAGUACCU |
| 975 | 14371 | GUGGAGGGAAUCUG |
| 976 | 14372 | AGAAAUGCUGACUA |
| 977 | 14373 | AGCUCCGUGCUAAU |
| 978 | 14374 | AACUGUGUCUCUUA |
| 979 | 14375 | GACACAACAUGUUC |
| 980 | 14376 | AGUUUGCACUUAUG |
| 981 | 14377 | ACAAACUGAAUUUG |
| 982 | 14378 | AAAGGACUGCUUGU |
| 983 | 14379 | UUUUGGGAAUACUU |
| 984 | 14380 | CUUUACUGUGAUUG |
| 985 | 14381 | AAGGGAAAGCUAUU |
| 986 | 14382 | AGUAUCAACCAAUA |
| 987 | 14383 | AUUGGCCAUUUCUG |
| 988 | 14384 | AACUCUGAUUACAA |
| 989 | 14385 | AUUAAAGCCUGAGU |
| 990 | 14386 | AGAAGAAAUAGCUG |
| 991 | 14387 | UAAAAGCAAGAUAU |
| 992 | 14388 | AUGAUGAACCUUGU |
| 993 | 14389 | AUGCAAAACACAAU |
| 994 | 14390 | UUCUUUAUUGUGGC |
| 995 | 14391 | AAAGGUAAUCCACC |
| 996 | 14392 | UUUGAAGAGAGAAG |
| 997 | 14393 | AUUGAAGCAUCCCA |
| 998 | 14394 | AGUUUAGAAGAUUU |
| 999 | 14395 | UACAAACUGAAUUU |
| 1000 | 14396 | UUAUAAAAUGACAG |
| 1001 | 14397 | UGUAUCAAAGCAUU |
| 1002 | 14398 | AAAUAUAAAGAGGA |
| 1003 | 14399 | UUAGAUGAAUUUGC |
| 1004 | 14400 | AUGUGUAUUUGGAA |

[0317] Tables 2a-2b below show the nucleobase sequences composing the 252 hairpin constructs of the disclosed embodiments as selected in accordance with the examples. The nucleobase sequences are a direct fusion of the antisense sequences of Table 1a with the corresponding sense sequences of Table 1b.

TABLE 2a
Nucleobase sequences of 252 CFB constructs in which the sense and the
antisense sequences of Tables 1a and 1b are combined.

| SEQ ID NO. | Sense ID | Antisense ID | 33mer CFB Hairpin sequence |
|---|---|---|---|
| 1005 | 14151 | 24151 | ACACAGUUUGGCCUGGAGAAGGCCAAACUGUGU |
| 1006 | 14152 | 24152 | GGAAUCUUGAAGUCAGGAAGACUUCAAGAUUCC |
| 1007 | 14153 | 24153 | CUGGGCUUGUAGCUGGCACAGCUACAAGCCCAG |
| 1008 | 14154 | 24154 | UCAAGUAAUUAUAGUGAGUCUAUAAUUACUUGA |
| 1009 | 14155 | 24155 | AAACAGGUUUGUCUGUAUGAGACAAACCUGUUU |
| 1010 | 14156 | 24156 | GCAGACAUUUUAACACAGAGUUAAAAUGUCUGC |
| 1011 | 14157 | 24157 | ACCUGGAGCUGGUUGCCACAACCAGCUCCAGGU |
| 1012 | 14158 | 24158 | GAUAAAAUCAAGUAAUUAUUACUUGAUUUUAUC |
| 1013 | 14159 | 24159 | GACACAGUUUGGCCUGGAGGGCCAAACUGUGUC |
| 1014 | 14160 | 24160 | CGGAAUCUUGAAGUCAGGAACUUCAAGAUUCCG |
| 1015 | 14161 | 24161 | AGACAUUUUAACACAGAACGUGUUAAAAUGUCU |
| 1016 | 14162 | 24162 | UGAAGUCAGGAAAAGAGAUUUUUCCUGACUUCA |
| 1017 | 14163 | 24163 | CACAGUUUGGCCUGGAGAACAGGCCAAACUGUG |
| 1018 | 14164 | 24164 | AAUUAUAGUGAGUUAUUUUAACUCACUAUAAUU |
| 1019 | 14165 | 24165 | UCCAAGUCAGAUGUCUCUUACAUCUGACUUGGA |
| 1020 | 14166 | 24166 | UCAGGAAAAGAGAUAAUUCAUCUCUUUUCCUGA |
| 1021 | 14167 | 24167 | GGCAAGACAUAUUCUUUAAGAAUAUGUCUUGCC |
| 1022 | 14168 | 24168 | GAAGGCCAAUUUCCAGAGGGGAAAUUGGCCUUC |
| 1023 | 14169 | 24169 | CAAGUAAUUAUAGUGAGUUACUAUAAUUACUUG |
| 1024 | 14170 | 24170 | AUAAAAUCAAGUAAUUAUAUUACUUGAUUUUAU |
| 1025 | 14171 | 24171 | AUCAAGUAAUUAUAGUGAGUAUAAUUACUUGAU |
| 1026 | 14172 | 24172 | GCCAAUUUCCAGAGGAAGCCUCUGGAAAUUGGC |
| 1027 | 14173 | 24173 | AGUAAUUAUAGUGAGUUAUUCACUAUAAUUACU |
| 1028 | 14174 | 24174 | UAAAGGUACUUGUUGUUUAAACAAGUACCUUUA |
| 1029 | 14175 | 24175 | GACUGCUGUUUCAGAAUCACUGAAACAGCAGUC |
| 1030 | 14176 | 24176 | ACUGCUGUUUCAGAAUCAAUCUGAAACAGCAGU |
| 1031 | 14177 | 24177 | AUAUAAAGGUACUUGUUGUAAGUACCUUUAUAU |
| 1032 | 14178 | 24178 | UGUAAACAGUUCCUUUCAAAGGAACUGUUUACA |
| 1033 | 14179 | 24179 | GGUAACUUUGGCUGAGAGACAGCCAAAGUUACC |
| 1034 | 14180 | 24180 | UAUAGUUGUAAACAGUUCCUGUUUACAACUAUA |
| 1035 | 14181 | 24181 | ACAUAUUCUUUAACUUCAAGUUAAAGAAUAUGU |
| 1036 | 14182 | 24182 | AAGCAGUCCUUUUACACUCUAAAAGGACUGCUU |
| 1037 | 14183 | 24183 | UAGUGAGUUAUUUUGUCAAAAAAUAACUCACUA |
| 1038 | 14184 | 24184 | AGGAAGACAUCUUUGAACAAAAGAUGUCUUCCU |
| 1039 | 14185 | 24185 | GCAGUCCUUUUACACUCAAUGUAAAAGGACUGC |
| 1040 | 14186 | 24186 | AGUUAUUUUGUCAAUAUAUUUGACAAAAUAACU |
| 1041 | 14187 | 24187 | GUACAACAGAAUAUGGUAUAUAUUCUGUUGUAC |
| 1042 | 14188 | 24188 | GUUAUUUUGUCAAUAUAUGAUUGACAAAAUAAC |
| 1043 | 14189 | 24189 | CAGGCUUCAGGAAAAGAGGUUUCCUGAAGCCUG |
| 1044 | 14190 | 24190 | AGGAAAAGAGAUAAUUCCAUUAUCUCUUUUCCU |
| 1045 | 14191 | 24191 | UGUUACAGCAAUAUAAAGGAUAUUGCUGUAACA |
| 1046 | 14192 | 24192 | UAUAAGCAUAUGCAAUCUCUGCAUAUGCUUAUA |
| 1047 | 14193 | 24193 | CAUAUUCUUUAACUUCAAAAGUUAAAGAAUAUG |
| 1048 | 14194 | 24194 | AAGACAUCUUUGAACACCUUUCAAAGAUGUCUU |
| 1049 | 14195 | 24195 | CCAGGAAGACAUCUUUGAAAGAUGUCUUCCUGG |
| 1050 | 14196 | 24196 | UACAGCAAUAUAAAGGUACUUUAUAUUGCUGUA |
| 1051 | 14197 | 24197 | CAUUGUCAUAGGUUAUUGGAACCUAUGACAAUG |
| 1052 | 14198 | 24198 | UGAGUUAUUUUGUCAAUAUGACAAAAUAACUCA |
| 1053 | 14199 | 24199 | AGUGAGUUAUUUUGUCAAUCAAAAUAACUCACU |
| 1054 | 14200 | 24200 | GUGAGUUAUUUUGUCAAUAACAAAAUAACUCAC |
| 1055 | 14201 | 24201 | GAAUUUUCCUUGAAAGAUCUUCAAGGAAAAUUC |
| 1056 | 14202 | 24202 | ACUGUUACAGCAAUAUAAAAUUGCUGUAACAGU |
| 1057 | 14203 | 24203 | AAAUCCAUUGUCAUAGGUUAUGACAAUGGAUUU |
| 1058 | 14204 | 24204 | AAUCCAUUGUCAUAGGUUAUAUGACAAUGGAUU |
| 1059 | 14205 | 24205 | GAGAAAUCCAUUGUCAUAGACAAUGGAUUUCUC |
| 1060 | 14206 | 24206 | AAGACAUAUUCUUUAACUUAAAGAAUAUGUCUU |
| 1061 | 14207 | 24207 | AAGUGCAGAUUCCCUCCACGGGAAUCUGCACUU |
| 1062 | 14208 | 24208 | AUCCAUUGUCAUAGGUUAUCUAUGACAAUGGAU |
| 1063 | 14209 | 24209 | AGACAUCUUUGAACACCUUGUUCAAAGAUGUCU |
| 1064 | 14210 | 24210 | CCAUUGUCAUAGGUUAUUGACCUAUGACAAUGG |
| 1065 | 14211 | 24211 | UGAAGAGAAAUCCAUUGUCUGGAUUUCUCUUCA |
| 1066 | 14212 | 24212 | GACAUAUUCUUUAACUUCAUUAAAGAAUAUGUC |
| 1067 | 14213 | 24213 | CAGUCCUUUUACACUCAAAGUGUAAAAGGACUG |
| 1068 | 14214 | 24214 | AAUUUUCCUUGAAAGAUCCUUUCAAGGAAAAUU |
| 1069 | 14215 | 24215 | UGAAAUUGUAUUUUAUCUGAAAAUACAAUUUCA |
| 1070 | 14216 | 24216 | AGUAAUUUCAAAAUUCUUAAUUUUGAAAUUACU |
| 1071 | 14217 | 24217 | CAAAAUUCUUAAAGUUCUUCUUUAAGAAUUUUG |
| 1072 | 14218 | 24218 | UGAAUUUUGGUUCUGCUCUAGAACCAAAAUUCA |
| 1073 | 14219 | 24219 | UGUCAUUUUAUAAUUAUGUAUUAUAAAAUGACA |
| 1074 | 14220 | 24220 | CCAAAUCCUGUACUGACAAAGUACAGGAUUUGG |
| 1075 | 14221 | 24221 | GGAUAACUUUUAAUAGAGAAUUAAAAGUUAUCC |
| 1076 | 14222 | 24222 | UUUAAGUCUUCUCUUAUUCAGAGAAGACUUAAA |
| 1077 | 14223 | 24223 | GAUAAUUCCAAUAUGAUCAAUAUUGGAAUUAUC |
| 1078 | 14224 | 24224 | GGAUAAAUGAACAUGGCCUAUGUUCAUUUAUCC |
| 1079 | 14225 | 24225 | CAAGGUUCAUCAUUUUCUUAAUGAUGAACCUUG |
| 1080 | 14226 | 24226 | UGGAAGUGCUAUAAAACAUUUAUAGCACUUCCA |
| 1081 | 14227 | 24227 | CCAAGUACUCUUAAAGCAAUUAAGAGUACUUGG |
| 1082 | 14228 | 24228 | UCCAAUGAUUUCCUGUUUCAGGAAAUCAUUGGA |
| 1083 | 14229 | 24229 | UAUGGUAUAUUCAUUUCCAAUGAAUAUACCAUA |
| 1084 | 14230 | 24230 | GAACAAGAUGAACUUCCCAAGUUCAUCUUGUUC |
| 1085 | 14231 | 24231 | UGAACUUCAGGAAUUUUAGAUUCCUGAAGUUCA |
| 1086 | 14232 | 24232 | AAGUCUUCUCUUAUUCCAAAUAAGAGAAGACUU |
| 1087 | 14233 | 24233 | GAAUGUUUAUACUUUGAUAAAGUAUAAACAUUC |
| 1088 | 14234 | 24234 | CCGGAAUCGUACACAAAGGGUGUACGAUUCCGG |
| 1089 | 14235 | 24235 | CAUACCUCUGCUCUUCUGAAGAGCAGAGGUAUG |
| 1090 | 14236 | 24236 | GAUCAAUUUCUUCUACCAUAGAAGAAAUUGAUC |
| 1091 | 14237 | 24237 | CAACAUUGUGUUUUGCAUUAAAACACAAUGUUG |
| 1092 | 14238 | 24238 | UAACUUUAUAAGCAUAUGCUGCUUAUAAAGUUA |
| 1093 | 14239 | 24239 | CAGGAUAACUUUUAAUAGAUAAAAGUUAUCCUG |
| 1094 | 14240 | 24240 | UUUUAUUGGUUGAUACUGUAUCAACCAAUAAAA |
| 1095 | 14241 | 24241 | UGCAACUGUUUUCUUCUGGAGAAAACAGUUGCA |
| 1096 | 14242 | 24242 | UGCUUUGAUACAACUUCCAGUUGUAUCAAAGCA |
| 1097 | 14243 | 24243 | CCAAAGCUUCUCUCUUCAAGAGAGAAGCUUUGG |
| 1098 | 14244 | 24244 | GGGAACUCCUUUCGUCUGCCGAAAGGAGUUCCC |
| 1099 | 14245 | 24245 | UAUGACAGUUCUUUGACUGAAAGAACUGUCAUA |
| 1100 | 14246 | 24246 | UUGCAGAAUAACAUGUCCAAUGUUAUUCUGCAA |
| 1101 | 14247 | 24247 | CAGAAGUCCUAUAGUUGUACUAUAGGACUUCUG |
| 1102 | 14248 | 24248 | GAUAACUUUUAAUAGAGAUUAUUAAAAGUUAUC |
| 1103 | 14249 | 24249 | ACUAAGAUUUCUUUUCCAAAAAGAAAUCUUAGU |
| 1104 | 14250 | 24250 | GAUAAAUGAACAUGGCCUGCAUGUUCAUUUAUC |
| 1105 | 14251 | 24251 | GAUGAACAUGUUGUGUCUCACAACAUGUUCAUC |
| 1106 | 14252 | 24252 | UGAUCAUCUUUUAAGUCUUUUAAAAGAUGAUCA |
| 1107 | 14253 | 24253 | GAGCAAUUCCAUUUAUCAAAAAUGGAAUUGCUC |
| 1108 | 14254 | 24254 | UGUGAAUUUUCCUUGAAAGAAGGAAAAUUCACA |
| 1109 | 14255 | 24255 | UCAAAAUUCUUAAAGUUCUUUUAAGAAUUUUGA |
| 1110 | 14256 | 24256 | UAAACUCCAGCACCGUCACGGUGCUGGAGUUUA |
| 1111 | 14257 | 24257 | UUGAUAUUGGAAGUGCUAUACUUCCAAUAUCAA |
| 1112 | 14258 | 24258 | GUGCAUUCAGUGUUACUGGAACACUGAAUGCAC |
| 1113 | 14259 | 24259 | AAUGUUUAUACUUUGAUAAAAAGUAUAAACAUU |
| 1114 | 14260 | 24260 | AAAUUGUAUUUUAUCUGGAAUAAAAUACAAUUU |
| 1115 | 14261 | 24261 | UAAGUCUUCUCUUAUUCCAUAAGAGAAGACUUA |
| 1116 | 14262 | 24262 | AGAAGUCCUAUAGUUGUAAACUAUAGGACUUCU |
| 1117 | 14263 | 24263 | CUUGCUUUUAUAGUAAUUUACUAUAAAAGCAAG |
| 1118 | 14264 | 24264 | UCAACAUUGUGUUUUGCAUAAACACAAUGUUGA |
| 1119 | 14265 | 24265 | AGGCAGUUGUUUCUACCAUAGAAACAACUGCCU |
| 1120 | 14266 | 24266 | UAUGAUCAAUUUCUUCUACAGAAAUUGAUCAUA |
| 1121 | 14267 | 24267 | GUAAUUUCAAAAUUCUUAAAAUUUUGAAAUUAC |
| 1122 | 14268 | 24268 | AUCAACAUUGUGUUUUGCAAACACAAUGUUGAU |
| 1123 | 14269 | 24269 | CAAAGUAUUCCCAAAAGGCUUGGGAAUACUUUG |
| 1124 | 14270 | 24270 | AAAACAUGGUACACUGUUUGUGUACCAUGUUUU |
| 1125 | 14271 | 24271 | ACACAGAACUGCAUCCCAGAUGCAGUUCUGUGU |
| 1126 | 14272 | 24272 | UCCAAGUACUCUUAAAGCAUAAGAGUACUUGGA |
| 1127 | 14273 | 24273 | UGUAGUAUGACAGUUCUUUACUGUCAUACUACA |
| 1128 | 14274 | 24274 | CAGAAUAGCUUUCCCUUUUGGAAAGCUAUUCUG |
| 1129 | 14275 | 24275 | GCUUUUAUAGUAAUUUCAAAUUACUAUAAAAGC |
| 1130 | 14276 | 24276 | GAAGCUACUCCAUCAUCAAGAUGGAGUAGCUUC |
| 1131 | 14277 | 24277 | UGCCACUAAUUCUAAGUAAUAGAAUUAGUGGCA |
| 1132 | 14278 | 24278 | GUAGACUCUAUGACUGUUAGUCAUAGAGUCUAC |
| 1133 | 14279 | 24279 | CUAAGAUUUCUUUUCCAAAAAAAGAAAUCUUAG |
| 1134 | 14280 | 24280 | CAAUAUUUAACCAGACUGACUGGUUAAAUAUUG |
| 1135 | 14281 | 24281 | UAGUAAUUUCAAAAUUCUUUUUUGAAAUUACUA |
| 1136 | 14282 | 24282 | GGAAAAGAGAUAAUUCCAAAUUAUCUCUUUUCC |
| 1137 | 14283 | 24283 | AAAAUGCUUGACACGAUGAGUGUCAAGCAUUUU |
| 1138 | 14284 | 24284 | UAUAUUCAUUUCCAGGAAGUGGAAAUGAAUAUA |
| 1139 | 14285 | 24285 | UAAUAAAAGCAAGUGCCACACUUGCUUUUAUUA |
| 1140 | 14286 | 24286 | UACUAUGCGUUUGUAAUCAACAAACGCAUAGUA |
| 1141 | 14287 | 24287 | GAAUUGAAAUACUCUUUCCGAGUAUUUCAAUUC |
| 1142 | 14288 | 24288 | UCAGGAUAACUUUUAAUAGAAAAGUUAUCCUGA |
| 1143 | 14289 | 24289 | UACAACUUCCAAAUACACAAUUUGGAAGUUGUA |
| 1144 | 14290 | 24290 | AAUCAUUCUCUAAUAAAAGAUUAGAGAAUGAUU |
| 1145 | 14291 | 24291 | GAAUAGCUUUCCCUUUUGAAGGGAAAGCUAUUC |
| 1146 | 14292 | 24292 | GGAAAUUCUUGUCUGUCAUAGACAAGAAUUUCC |
| 1147 | 14293 | 24293 | UUGAAUUUUGGUUCUGCUCGAACCAAAAUUCAA |
| 1148 | 14294 | 24294 | AGUGAGCUUUACAAAUAAGUUGUAAAGCUCACU |
| 1149 | 14295 | 24295 | AAACAUGGUACACUGUUUAAGUGUACCAUGUUU |
| 1150 | 14296 | 24296 | UAGACUCUAUGACUGUUACAGUCAUAGAGUCUA |
| 1151 | 14297 | 24297 | UUUUCUUGGGAGUCAUCUGGACUCCCAAGAAAA |
| 1152 | 14298 | 24298 | GUAGGCAAGGAGAUGUCCAAUCUCCUUGCCUAC |
| 1153 | 14299 | 24299 | AAAGCCACCUCCAUACCUCAUGGAGGUGGCUUU |
| 1154 | 14300 | 24300 | UAAGAUUUCUUUUCCAAACGAAAAGAAAUCUUA |
| 1155 | 14301 | 24301 | AAAGCUGCAAACUUCCUCAAAGUUUGCAGCUUU |
| 1156 | 14302 | 24302 | UCUAAUAAAAGCAAGUGCCUUGCUUUUAUUAGA |
| 1157 | 14303 | 24303 | CAAUUGUUUGUGCAUUCAGUGCACAAACAAUUG |
| 1158 | 14304 | 24304 | ACCAAAGCUUCUCUCUUCAAGAGAAGCUUUGGU |
| 1159 | 14305 | 24305 | GCAACUGUUUUCUUCUGGGAAGAAAACAGUUGC |
| 1160 | 14306 | 24306 | AUGCUUUGAUACAACUUCCUUGUAUCAAAGCAU |
| 1161 | 14307 | 24307 | AAUUCAUCUAAAUUAGCUAAAUUUAGAUGAAUU |
| 1162 | 14308 | 24308 | UGUGACGAUGUAAUAGACCAUUACAUCGUCACA |
| 1163 | 14309 | 24309 | GGUACACUGUUUAUCUGGUAUAAACAGUGUACC |
| 1164 | 14310 | 24310 | GGUUGCCUUGUACUUGACAAGUACAAGGCAACC |
| 1165 | 14311 | 24311 | CCAAGGAAAUUCUUGUCUGAAGAAUUUCCUUGG |
| 1166 | 14312 | 24312 | UUAACCAGACUGAAUCAGAUUCAGUCUGGUUAA |
| 1167 | 14313 | 24313 | UAGCAGCUAUUUCUUCUAUAGAAAUAGCUGCUA |
| 1168 | 14314 | 24314 | CCAGUUUUGUAGAUAUCCAAUCUACAAAACUGG |
| 1169 | 14315 | 24315 | AAUGAUUUCCUGUUUCCAGAACAGGAAAUCAUU |
| 1170 | 14316 | 24316 | AGACAAGAUCUCACCUACAGUGAGAUCUUGUCU |
| 1171 | 14317 | 24317 | GUGGAUUACCUUUAACCAAUAAAGGUAAUCCAC |
| 1172 | 14318 | 24318 | UGAUACUGUGAAUUUUCCUAAUUCACAGUAUCA |
| 1173 | 14319 | 24319 | AAUACUGGGACAACGCUCAGUUGUCCCAGUAUU |
| 1174 | 14320 | 24320 | CAUAAUUAAGUACUGUCUUAGUACUUAAUUAUG |
| 1175 | 14321 | 24321 | CAAACUUCCUCAGAGGUACUCUGAGGAAGUUUG |
| 1176 | 14322 | 24322 | AAGGCCAUGUUAUUUCAGAAAUAACAUGGCCUU |
| 1177 | 14323 | 24323 | UGCAAACUGUAUGCAGCUGGCAUACAGUUUGCA |
| 1178 | 14324 | 24324 | AGAAUAGCUUUCCCUUUUGGGGAAAGCUAUUCU |
| 1179 | 14325 | 24325 | UACUGUGAAUUUUCCUUGAGAAAAUUCACAGUA |
| 1180 | 14326 | 24326 | CCAACUUCAAAGAGUUCAACUCUUUGAAGUUGG |
| 1181 | 14327 | 24327 | CUGAAUUUUGAUAUUGGAAAUAUCAAAAUUCAG |
| 1182 | 14328 | 24328 | AAAGGCUGUAAGAUAUAAGAUCUUACAGCCUUU |
| 1183 | 14329 | 24329 | UUGCUUUUAUAGUAAUUUCUACUAUAAAAGCAA |
| 1184 | 14330 | 24330 | GUCCAAGUACUCUUAAAGCAAGAGUACUUGGAC |
| 1185 | 14331 | 24331 | ACACUAAUUCUGCUGUCUGAGCAGAAUUAGUGU |
| 1186 | 14332 | 24332 | CUGGCUUGCUUACUGGUAAAGUAAGCAAGCCAG |
| 1187 | 14333 | 24333 | GUUGCCUUGUACUUGACAAAAGUACAAGGCAAC |
| 1188 | 14334 | 24334 | CAGCAUUUCUGUAGGACAUCUACAGAAAUGCUG |
| 1189 | 14335 | 24335 | UUAUACUUUGAUAAGAUGCUUAUCAAAGUAUAA |
| 1190 | 14336 | 24336 | UUAAGUACUGUCUUCCUUUAAGACAGUACUUAA |
| 1191 | 14337 | 24337 | CUGCAAACUUCCUCAGAGGGAGGAAGUUUGCAG |
| 1192 | 14338 | 24338 | AAGACAGUUUCUCUUUUGGAGAGAAACUGUCUU |
| 1193 | 14339 | 24339 | AUUCAGUUUGUAGGGAGAGCCUACAAACUGAAU |
| 1194 | 14340 | 24340 | UGGAAUGUUUAUACUUUGAGUAUAAACAUUCCA |
| 1195 | 14341 | 24341 | UAACAGGGUCUUCAUGUGUUGAAGACCCUGUUA |
| 1196 | 14342 | 24342 | AGAGAUUGUUGCAUCAAAUAUGCAACAAUCUCU |
| 1197 | 14343 | 24343 | GAGUCAUCUGCAUUUGCAUAAUGCAGAUGACUC |
| 1198 | 14344 | 24344 | GAAUGUUUAUAUUUAGCAGAAAUAUAAACAUUC |
| 1199 | 14345 | 24345 | GGAACAAGAUGAACUUCCCGUUCAUCUUGUUCC |
| 1200 | 14346 | 24346 | GGUAUUUCUGCCUCUUCAGGAGGCAGAAAUACC |
| 1201 | 14347 | 24347 | CAGAACUGCAUCCCAGAAGGGGAUGCAGUUCUG |
| 1202 | 14348 | 24348 | UUCCGGUGUCCAAUAACCUAUUGGACACCGGAA |
| 1203 | 14349 | 24349 | CAUCAAUUGUUUGUGCAUUACAAACAAUUGAUG |
| 1204 | 14350 | 24350 | AAUACUCUUUCCAAGGGCUUUGGAAAGAGUAUU |
| 1205 | 14351 | 24351 | UCAAAUGCUUCAGUGUAUCACUGAAGCAUUUGA |
| 1206 | 14352 | 24352 | AAGCAAGUGCCACUAAUUCAGUGGCACUUGCUU |
| 1207 | 14353 | 24353 | UUAAUAGAGAUUGUUGCAUACAAUCUCUAUUAA |
| 1208 | 14354 | 24354 | AUAGAGAUUGUUGCAUCAAGCAACAAUCUCUAU |
| 1209 | 14355 | 24355 | GAACUCCUUUCGUCUGCUAGACGAAAGGAGUUC |
| 1210 | 14356 | 24356 | GUCAUUUUAUAAUUAUGUAAAUUAUAAAAUGAC |
| 1211 | 14357 | 24357 | AAGAAUUGAAAUACUCUUUGUAUUUCAAUUCUU |
| 1212 | 14358 | 24358 | AAAGCCUUUCUAAUUCCAAAUUAGAAAGGCUUU |
| 1213 | 14359 | 24359 | UCAAUAUUUAACCAGACUGUGGUUAAAUAUUGA |
| 1214 | 14360 | 24360 | UGGUAUAUUCAUUUCCAGGAAAUGAAUAUACCA |
| 1215 | 14361 | 24361 | UGAAACAAUUGAACGAAACGUUCAAUUGUUUCA |
| 1216 | 14362 | 24362 | AAUAUCUUGCUUUUAUAGUAAAAGCAAGAUAUU |
| 1217 | 14363 | 24363 | AGAGAUUGUCAGAUCCAAUAUCUGACAAUCUCU |
| 1218 | 14364 | 24364 | AGCAAUUCCAUUUAUCAACUAAAUGGAAUUGCU |
| 1219 | 14365 | 24365 | UUAUCAGGAUAACUUUUAAAGUUAUCCUGAUAA |
| 1220 | 14366 | 24366 | CGAAUUUCUGGCUUGCUUAAAGCCAGAAAUUCG |
| 1221 | 14367 | 24367 | UCAAGUUCAGACUGGUGAGCAGUCUGAACUUGA |
| 1222 | 14368 | 24368 | AGAGGUACUGGUUUUGUGAAAACCAGUACCUCU |
| 1223 | 14369 | 24369 | GGUAUUUUCUUUCAAGCAAUGAAAGAAAAUACC |
| 1224 | 14370 | 24370 | AGGUACUGGUUUUGUGAACCAAAACCAGUACCU |
| 1225 | 14371 | 24371 | CAGAUUCCCUCCACAGCAGGUGGAGGGAAUCUG |
| 1226 | 14372 | 24372 | UAGUCAGCAUUUCUGUAGGAGAAAUGCUGACUA |
| 1227 | 14373 | 24373 | AUUAGCACGGAGCUGGCUUAGCUCCGUGCUAAU |
| 1228 | 14374 | 24374 | UAAGAGACACAGUUUGGCCAACUGUGUCUCUUA |
| 1229 | 14375 | 24375 | GAACAUGUUGUGUCUCUAGGACACAACAUGUUC |
| 1230 | 14376 | 24376 | CAUAAGUGCAAACUGUAUGAGUUUGCACUUAUG |
| 1231 | 14377 | 24377 | CAAAUUCAGUUUGUAGGGAACAAACUGAAUUUG |
| 1232 | 14378 | 24378 | ACAAGCAGUCCUUUUACACAAAGGACUGCUUGU |
| 1233 | 14379 | 24379 | AAGUAUUCCCAAAAGGCCCUUUUGGGAAUACUU |
| 1234 | 14380 | 24380 | CAAUCACAGUAAAGGCUGUCUUUACUGUGAUUG |
| 1235 | 14381 | 24381 | AAUAGCUUUCCCUUUUGACAAGGGAAAGCUAUU |
| 1236 | 14382 | 24382 | UAUUGGUUGAUACUGUGAAAGUAUCAACCAAUA |
| 1237 | 14383 | 24383 | CAGAAAUGGCCAAUGUAAAAUUGGCCAUUUCUG |
| 1238 | 14384 | 24384 | UUGUAAUCAGAGUUUCCGUAACUCUGAUUACAA |
| 1239 | 14385 | 24385 | ACUCAGGCUUUAAUGAUCAAUUAAAGCCUGAGU |
| 1240 | 14386 | 24386 | CAGCUAUUUCUUCUAUCUUAGAAGAAAUAGCUG |
| 1241 | 14387 | 24387 | AUAUCUUGCUUUUAUAGUAUAAAAGCAAGAUAU |
| 1242 | 14388 | 24388 | ACAAGGUUCAUCAUUUUCUAUGAUGAACCUUGU |
| 1243 | 14389 | 24389 | AUUGUGUUUUGCAUUGCUGAUGCAAAACACAAU |
| 1244 | 14390 | 24390 | GCCACAAUAAAGAAUUACAUUCUUUAUUGUGGC |
| 1245 | 14391 | 24391 | GGUGGAUUACCUUUAACCAAAAGGUAAUCCACC |
| 1246 | 14392 | 24392 | CUUCUCUCUUCAAAGCUGAUUUGAAGAGAGAAG |
| 1247 | 14393 | 24393 | UGGGAUGCUUCAAUAUCCUAUUGAAGCAUCCCA |
| 1248 | 14394 | 24394 | AAAUCUUCUAAACUGUAGUAGUUUAGAAGAUUU |
| 1249 | 14395 | 24395 | AAAUUCAGUUUGUAGGGAGUACAAACUGAAUUU |
| 1250 | 14396 | 24396 | CUGUCAUUUUAUAAUUAUGUUAUAAAAUGACAG |
| 1251 | 14397 | 24397 | AAUGCUUUGAUACAACUUCUGUAUCAAAGCAUU |
| 1252 | 14398 | 24398 | UCCUCUUUAUAUUUAGCCUAAAUAUAAAGAGGA |
| 1253 | 14399 | 24399 | GCAAAUUCAUCUAAAUUAGUUAGAUGAAUUUGC |
| 1254 | 14400 | 24400 | UUCCAAAUACACAUAAGAAAUGUGUAUUUGGAA |

TABLE 2b
Nucleobase sequences of 250 C5 constructs in which the sense
and the antisense sequences of Tables 1c and 1d are combined.

| SEQ ID | Sense | Antisense | |
|---|---|---|---|
| NO. | ID | ID | 33 mer C5 Hairpin sequences |
| 1255 | 14151 | 24151 | ACACAGUUUGGCCUGGAGAAGGCCAAACUGUGU |
| 1256 | 14152 | 24152 | GGAAUCUUGAAGUCAGGAAGACUUCAAGAUUCC |
| 1257 | 14153 | 24153 | CUGGGCUUGUAGCUGGCACAGCUACAAGCCCAG |
| 1258 | 14154 | 24154 | UCAAGUAAUUAUAGUGAGUCUAUAAUUACUUGA |
| 1259 | 14155 | 24155 | AAACAGGUUUGUCUGUAUGAGACAAACCUGUUU |
| 1260 | 14156 | 24156 | GCAGACAUUUUAACACAGAGUUAAAAUGUCUGC |
| 1261 | 14157 | 24157 | ACCUGGAGCUGGUUGCCACAACCAGCUCCAGGU |
| 1262 | 14158 | 24158 | GAUAAAAUCAAGUAAUUAUUACUUGAUUUUAUC |
| 1263 | 14159 | 24159 | GACACAGUUUGGCCUGGAGGGCCAAACUGUGUC |
| 1264 | 14160 | 24160 | CGGAAUCUUGAAGUCAGGAACUUCAAGAUUCCG |
| 1265 | 14161 | 24161 | AGACAUUUUAACACAGAACGUGUUAAAAUGUCU |
| 1266 | 14162 | 24162 | UGAAGUCAGGAAAAGAGAUUUUUCCUGACUUCA |
| 1267 | 14163 | 24163 | CACAGUUUGGCCUGGAGAACAGGCCAAACUGUG |
| 1268 | 14164 | 24164 | AAUUAUAGUGAGUUAUUUUAACUCACUAUAAUU |
| 1269 | 14165 | 24165 | UCCAAGUCAGAUGUCUCUUACAUCUGACUUGGA |
| 1270 | 14166 | 24166 | UCAGGAAAAGAGAUAAUUCAUCUCUUUUCCUGA |
| 1271 | 14167 | 24167 | GGCAAGACAUAUUCUUUAAGAAUAUGUCUUGCC |
| 1272 | 14168 | 24168 | GAAGGCCAAUUUCCAGAGGGGAAAUUGGCCUUC |
| 1273 | 14169 | 24169 | CAAGUAAUUAUAGUGAGUUACUAUAAUUACUUG |
| 1274 | 14170 | 24170 | AUAAAAUCAAGUAAUUAUAUUACUUGAUUUUAU |
| 1275 | 14171 | 24171 | AUCAAGUAAUUAUAGUGAGUAUAAUUACUUGAU |
| 1276 | 14172 | 24172 | GCCAAUUUCCAGAGGAAGCCUCUGGAAAUUGGC |
| 1277 | 14173 | 24173 | AGUAAUUAUAGUGAGUUAUUCACUAUAAUUACU |
| 1278 | 14174 | 24174 | UAAAGGUACUUGUUGUUUAAACAAGUACCUUUA |
| 1279 | 14175 | 24175 | GACUGCUGUUUCAGAAUCACUGAAACAGCAGUC |
| 1280 | 14176 | 24176 | ACUGCUGUUUCAGAAUCAAUCUGAAACAGCAGU |
| 1281 | 14177 | 24177 | AUAUAAAGGUACUUGUUGUAAGUACCUUUAUAU |
| 1282 | 14178 | 24178 | UGUAAACAGUUCCUUUCAAAGGAACUGUUUACA |
| 1283 | 14179 | 24179 | GGUAACUUUGGCUGAGAGACAGCCAAAGUUACC |
| 1284 | 14180 | 24180 | UAUAGUUGUAAACAGUUCCUGUUUACAACUAUA |
| 1285 | 14181 | 24181 | ACAUAUUCUUUAACUUCAAGUUAAAGAAUAUGU |
| 1286 | 14182 | 24182 | AAGCAGUCCUUUUACACUCUAAAAGGACUGCUU |
| 1287 | 14183 | 24183 | UAGUGAGUUAUUUUGUCAAAAAAUAACUCACUA |
| 1288 | 14184 | 24184 | AGGAAGACAUCUUUGAACAAAAGAUGUCUUCCU |
| 1289 | 14185 | 24185 | GCAGUCCUUUUACACUCAAUGUAAAAGGACUGC |
| 1290 | 14186 | 24186 | AGUUAUUUUGUCAAUAUAUUUGACAAAAUAACU |
| 1291 | 14187 | 24187 | GUACAACAGAAUAUGGUAUAUAUUCUGUUGUAC |
| 1292 | 14188 | 24188 | GUUAUUUUGUCAAUAUAUGAUUGACAAAAUAAC |
| 1293 | 14189 | 24189 | CAGGCUUCAGGAAAAGAGGUUUCCUGAAGCCUG |
| 1294 | 14190 | 24190 | AGGAAAAGAGAUAAUUCCAUUAUCUCUUUUCCU |
| 1295 | 14191 | 24191 | UGUUACAGCAAUAUAAAGGAUAUUGCUGUAACA |
| 1296 | 14192 | 24192 | UAUAAGCAUAUGCAAUCUCUGCAUAUGCUUAUA |
| 1297 | 14193 | 24193 | CAUAUUCUUUAACUUCAAAAGUUAAAGAAUAUG |
| 1298 | 14194 | 24194 | AAGACAUCUUUGAACACCUUUCAAAGAUGUCUU |
| 1299 | 14195 | 24195 | CCAGGAAGACAUCUUUGAAAGAUGUCUUCCUGG |
| 1300 | 14196 | 24196 | UACAGCAAUAUAAAGGUACUUUAUAUUGCUGUA |
| 1301 | 14197 | 24197 | CAUUGUCAUAGGUUAUUGGAACCUAUGACAAUG |
| 1302 | 14198 | 24198 | UGAGUUAUUUUGUCAAUAUGACAAAAUAACUCA |
| 1303 | 14199 | 24199 | AGUGAGUUAUUUUGUCAAUCAAAAUAACUCACU |
| 1304 | 14200 | 24200 | GUGAGUUAUUUUGUCAAUAACAAAAUAACUCAC |
| 1305 | 14201 | 24201 | GAAUUUUCCUUGAAAGAUCUUCAAGGAAAAUUC |
| 1306 | 14202 | 24202 | ACUGUUACAGCAAUAUAAAAUUGCUGUAACAGU |
| 1307 | 14203 | 24203 | AAAUCCAUUGUCAUAGGUUAUGACAAUGGAUUU |
| 1308 | 14204 | 24204 | AAUCCAUUGUCAUAGGUUAUAUGACAAUGGAUU |
| 1309 | 14205 | 24205 | GAGAAAUCCAUUGUCAUAGACAAUGGAUUUCUC |
| 1310 | 14206 | 24206 | AAGACAUAUUCUUUAACUUAAAGAAUAUGUCUU |
| 1311 | 14207 | 24207 | AAGUGCAGAUUCCCUCCACGGGAAUCUGCACUU |
| 1312 | 14208 | 24208 | AUCCAUUGUCAUAGGUUAUCUAUGACAAUGGAU |
| 1313 | 14209 | 24209 | AGACAUCUUUGAACACCUUGUUCAAAGAUGUCU |
| 1314 | 14210 | 24210 | CCAUUGUCAUAGGUUAUUGACCUAUGACAAUGG |
| 1315 | 14211 | 24211 | UGAAGAGAAAUCCAUUGUCUGGAUUUCUCUUCA |
| 1316 | 14212 | 24212 | GACAUAUUCUUUAACUUCAUUAAAGAAUAUGUC |
| 1317 | 14213 | 24213 | CAGUCCUUUUACACUCAAAGUGUAAAAGGACUG |
| 1318 | 14214 | 24214 | AAUUUUCCUUGAAAGAUCCUUUCAAGGAAAAUU |
| 1319 | 14215 | 24215 | UGAAAUUGUAUUUUAUCUGAAAAUACAAUUUCA |
| 1320 | 14216 | 24216 | AGUAAUUUCAAAAUUCUUAAUUUUGAAAUUACU |
| 1321 | 14217 | 24217 | CAAAAUUCUUAAAGUUCUUCUUUAAGAAUUUUG |
| 1322 | 14218 | 24218 | UGAAUUUUGGUUCUGCUCUAGAACCAAAAUUCA |
| 1323 | 14219 | 24219 | UGUCAUUUUAUAAUUAUGUAUUAUAAAAUGACA |
| 1324 | 14220 | 24220 | CCAAAUCCUGUACUGACAAAGUACAGGAUUUGG |
| 1325 | 14221 | 24221 | GGAUAACUUUUAAUAGAGAAUUAAAAGUUAUCC |
| 1326 | 14222 | 24222 | UUUAAGUCUUCUCUUAUUCAGAGAAGACUUAAA |
| 1327 | 14223 | 24223 | GAUAAUUCCAAUAUGAUCAAUAUUGGAAUUAUC |
| 1328 | 14224 | 24224 | GGAUAAAUGAACAUGGCCUAUGUUCAUUUAUCC |
| 1329 | 14225 | 24225 | CAAGGUUCAUCAUUUUCUUAAUGAUGAACCUUG |
| 1330 | 14226 | 24226 | UGGAAGUGCUAUAAAACAUUUAUAGCACUUCCA |
| 1331 | 14227 | 24227 | CCAAGUACUCUUAAAGCAAUUAAGAGUACUUGG |
| 1332 | 14228 | 24228 | UCCAAUGAUUUCCUGUUUCAGGAAAUCAUUGGA |
| 1333 | 14229 | 24229 | UAUGGUAUAUUCAUUUCCAAUGAAUAUACCAUA |
| 1334 | 14230 | 24230 | GAACAAGAUGAACUUCCCAAGUUCAUCUUGUUC |
| 1335 | 14231 | 24231 | UGAACUUCAGGAAUUUUAGAUUCCUGAAGUUCA |
| 1336 | 14232 | 24232 | AAGUCUUCUCUUAUUCCAAAUAAGAGAAGACUU |
| 1337 | 14233 | 24233 | GAAUGUUUAUACUUUGAUAAAGUAUAAACAUUC |
| 1338 | 14234 | 24234 | CCGGAAUCGUACACAAAGGGUGUACGAUUCCGG |
| 1339 | 14235 | 24235 | CAUACCUCUGCUCUUCUGAAGAGCAGAGGUAUG |
| 1340 | 14236 | 24236 | GAUCAAUUUCUUCUACCAUAGAAGAAAUUGAUC |
| 1341 | 14237 | 24237 | CAACAUUGUGUUUUGCAUUAAAACACAAUGUUG |
| 1342 | 14238 | 24238 | UAACUUUAUAAGCAUAUGCUGCUUAUAAAGUUA |
| 1343 | 14239 | 24239 | CAGGAUAACUUUUAAUAGAUAAAAGUUAUCCUG |
| 1344 | 14240 | 24240 | UUUUAUUGGUUGAUACUGUAUCAACCAAUAAAA |
| 1345 | 14241 | 24241 | UGCAACUGUUUUCUUCUGGAGAAAACAGUUGCA |
| 1346 | 14242 | 24242 | UGCUUUGAUACAACUUCCAGUUGUAUCAAAGCA |
| 1347 | 14243 | 24243 | CCAAAGCUUCUCUCUUCAAGAGAGAAGCUUUGG |
| 1348 | 14244 | 24244 | GGGAACUCCUUUCGUCUGCCGAAAGGAGUUCCC |
| 1349 | 14245 | 24245 | UAUGACAGUUCUUUGACUGAAAGAACUGUCAUA |
| 1350 | 14246 | 24246 | UUGCAGAAUAACAUGUCCAAUGUUAUUCUGCAA |
| 1351 | 14247 | 24247 | CAGAAGUCCUAUAGUUGUACUAUAGGACUUCUG |
| 1352 | 14248 | 24248 | GAUAACUUUUAAUAGAGAUUAUUAAAAGUUAUC |
| 1353 | 14249 | 24249 | ACUAAGAUUUCUUUUCCAAAAAGAAAUCUUAGU |
| 1354 | 14250 | 24250 | GAUAAAUGAACAUGGCCUGCAUGUUCAUUUAUC |
| 1355 | 14251 | 24251 | GAUGAACAUGUUGUGUCUCACAACAUGUUCAUC |
| 1356 | 14252 | 24252 | UGAUCAUCUUUUAAGUCUUUUAAAAGAUGAUCA |
| 1357 | 14253 | 24253 | GAGCAAUUCCAUUUAUCAAAAAUGGAAUUGCUC |
| 1358 | 14254 | 24254 | UGUGAAUUUUCCUUGAAAGAAGGAAAAUUCACA |
| 1359 | 14255 | 24255 | UCAAAAUUCUUAAAGUUCUUUUAAGAAUUUUGA |
| 1360 | 14256 | 24256 | UAAACUCCAGCACCGUCACGGUGCUGGAGUUUA |
| 1361 | 14257 | 24257 | UUGAUAUUGGAAGUGCUAUACUUCCAAUAUCAA |
| 1362 | 14258 | 24258 | GUGCAUUCAGUGUUACUGGAACACUGAAUGCAC |
| 1363 | 14259 | 24259 | AAUGUUUAUACUUUGAUAAAAAGUAUAAACAUU |
| 1364 | 14260 | 24260 | AAAUUGUAUUUUAUCUGGAAUAAAAUACAAUUU |
| 1365 | 14261 | 24261 | UAAGUCUUCUCUUAUUCCAUAAGAGAAGACUUA |
| 1366 | 14262 | 24262 | AGAAGUCCUAUAGUUGUAAACUAUAGGACUUCU |
| 1367 | 14263 | 24263 | CUUGCUUUUAUAGUAAUUUACUAUAAAAGCAAG |
| 1368 | 14264 | 24264 | UCAACAUUGUGUUUUGCAUAAACACAAUGUUGA |
| 1369 | 14265 | 24265 | AGGCAGUUGUUUCUACCAUAGAAACAACUGCCU |
| 1370 | 14266 | 24266 | UAUGAUCAAUUUCUUCUACAGAAAUUGAUCAUA |
| 1371 | 14267 | 24267 | GUAAUUUCAAAAUUCUUAAAAUUUUGAAAUUAC |
| 1372 | 14268 | 24268 | AUCAACAUUGUGUUUUGCAAACACAAUGUUGAU |
| 1373 | 14269 | 24269 | CAAAGUAUUCCCAAAAGGCUUGGGAAUACUUUG |
| 1374 | 14270 | 24270 | AAAACAUGGUACACUGUUUGUGUACCAUGUUUU |
| 1375 | 14271 | 24271 | ACACAGAACUGCAUCCCAGAUGCAGUUCUGUGU |
| 1376 | 14272 | 24272 | UCCAAGUACUCUUAAAGCAUAAGAGUACUUGGA |
| 1377 | 14273 | 24273 | UGUAGUAUGACAGUUCUUUACUGUCAUACUACA |
| 1378 | 14274 | 24274 | CAGAAUAGCUUUCCCUUUUGGAAAGCUAUUCUG |
| 1379 | 14275 | 24275 | GCUUUUAUAGUAAUUUCAAAUUACUAUAAAAGC |
| 1380 | 14276 | 24276 | GAAGCUACUCCAUCAUCAAGAUGGAGUAGCUUC |
| 1381 | 14277 | 24277 | UGCCACUAAUUCUAAGUAAUAGAAUUAGUGGCA |
| 1382 | 14278 | 24278 | GUAGACUCUAUGACUGUUAGUCAUAGAGUCUAC |
| 1383 | 14279 | 24279 | CUAAGAUUUCUUUUCCAAAAAAAGAAAUCUUAG |
| 1384 | 14280 | 24280 | CAAUAUUUAACCAGACUGACUGGUUAAAUAUUG |
| 1385 | 14281 | 24281 | UAGUAAUUUCAAAAUUCUUUUUUGAAAUUACUA |
| 1386 | 14282 | 24282 | GGAAAAGAGAUAAUUCCAAAUUAUCUCUUUUCC |
| 1387 | 14283 | 24283 | AAAAUGCUUGACACGAUGAGUGUCAAGCAUUUU |
| 1388 | 14284 | 24284 | UAUAUUCAUUUCCAGGAAGUGGAAAUGAAUAUA |
| 1389 | 14285 | 24285 | UAAUAAAAGCAAGUGCCACACUUGCUUUUAUUA |
| 1390 | 14286 | 24286 | UACUAUGCGUUUGUAAUCAACAAACGCAUAGUA |
| 1391 | 14287 | 24287 | GAAUUGAAAUACUCUUUCCGAGUAUUUCAAUUC |
| 1392 | 14288 | 24288 | UCAGGAUAACUUUUAAUAGAAAAGUUAUCCUGA |
| 1393 | 14289 | 24289 | UACAACUUCCAAAUACACAAUUUGGAAGUUGUA |
| 1394 | 14290 | 24290 | AAUCAUUCUCUAAUAAAAGAUUAGAGAAUGAUU |
| 1395 | 14291 | 24291 | GAAUAGCUUUCCCUUUUGAAGGGAAAGCUAUUC |
| 1396 | 14292 | 24292 | GGAAAUUCUUGUCUGUCAUAGACAAGAAUUUCC |
| 1397 | 14293 | 24293 | UUGAAUUUUGGUUCUGCUCGAACCAAAAUUCAA |
| 1398 | 14294 | 24294 | AGUGAGCUUUACAAAUAAGUUGUAAAGCUCACU |
| 1399 | 14295 | 24295 | AAACAUGGUACACUGUUUAAGUGUACCAUGUUU |
| 1400 | 14296 | 24296 | UAGACUCUAUGACUGUUACAGUCAUAGAGUCUA |
| 1401 | 14297 | 24297 | UUUUCUUGGGAGUCAUCUGGACUCCCAAGAAAA |
| 1402 | 14298 | 24298 | GUAGGCAAGGAGAUGUCCAAUCUCCUUGCCUAC |
| 1403 | 14299 | 24299 | AAAGCCACCUCCAUACCUCAUGGAGGUGGCUUU |
| 1404 | 14300 | 24300 | UAAGAUUUCUUUUCCAAACGAAAAGAAAUCUUA |
| 1405 | 14301 | 24301 | AAAGCUGCAAACUUCCUCAAAGUUUGCAGCUUU |
| 1406 | 14302 | 24302 | UCUAAUAAAAGCAAGUGCCUUGCUUUUAUUAGA |
| 1407 | 14303 | 24303 | CAAUUGUUUGUGCAUUCAGUGCACAAACAAUUG |
| 1408 | 14304 | 24304 | ACCAAAGCUUCUCUCUUCAAGAGAAGCUUUGGU |
| 1409 | 14305 | 24305 | GCAACUGUUUUCUUCUGGGAAGAAAACAGUUGC |
| 1410 | 14306 | 24306 | AUGCUUUGAUACAACUUCCUUGUAUCAAAGCAU |
| 1411 | 14307 | 24307 | AAUUCAUCUAAAUUAGCUAAAUUUAGAUGAAUU |
| 1412 | 14308 | 24308 | UGUGACGAUGUAAUAGACCAUUACAUCGUCACA |
| 1413 | 14309 | 24309 | GGUACACUGUUUAUCUGGUAUAAACAGUGUACC |
| 1414 | 14310 | 24310 | GGUUGCCUUGUACUUGACAAGUACAAGGCAACC |
| 1415 | 14311 | 24311 | CCAAGGAAAUUCUUGUCUGAAGAAUUUCCUUGG |
| 1416 | 14312 | 24312 | UUAACCAGACUGAAUCAGAUUCAGUCUGGUUAA |
| 1417 | 14313 | 24313 | UAGCAGCUAUUUCUUCUAUAGAAAUAGCUGCUA |
| 1418 | 14314 | 24314 | CCAGUUUUGUAGAUAUCCAAUCUACAAAACUGG |
| 1419 | 14315 | 24315 | AAUGAUUUCCUGUUUCCAGAACAGGAAAUCAUU |
| 1420 | 14316 | 24316 | AGACAAGAUCUCACCUACAGUGAGAUCUUGUCU |
| 1421 | 14317 | 24317 | GUGGAUUACCUUUAACCAAUAAAGGUAAUCCAC |
| 1422 | 14318 | 24318 | UGAUACUGUGAAUUUUCCUAAUUCACAGUAUCA |
| 1423 | 14319 | 24319 | AAUACUGGGACAACGCUCAGUUGUCCCAGUAUU |
| 1424 | 14320 | 24320 | CAUAAUUAAGUACUGUCUUAGUACUUAAUUAUG |
| 1425 | 14321 | 24321 | CAAACUUCCUCAGAGGUACUCUGAGGAAGUUUG |
| 1426 | 14322 | 24322 | AAGGCCAUGUUAUUUCAGAAAUAACAUGGCCUU |
| 1427 | 14323 | 24323 | UGCAAACUGUAUGCAGCUGGCAUACAGUUUGCA |
| 1428 | 14324 | 24324 | AGAAUAGCUUUCCCUUUUGGGGAAAGCUAUUCU |
| 1429 | 14325 | 24325 | UACUGUGAAUUUUCCUUGAGAAAAUUCACAGUA |
| 1430 | 14326 | 24326 | CCAACUUCAAAGAGUUCAACUCUUUGAAGUUGG |
| 1431 | 14327 | 24327 | CUGAAUUUUGAUAUUGGAAAUAUCAAAAUUCAG |
| 1432 | 14328 | 24328 | AAAGGCUGUAAGAUAUAAGAUCUUACAGCCUUU |
| 1433 | 14329 | 24329 | UUGCUUUUAUAGUAAUUUCUACUAUAAAAGCAA |
| 1434 | 14330 | 24330 | GUCCAAGUACUCUUAAAGCAAGAGUACUUGGAC |
| 1435 | 14331 | 24331 | ACACUAAUUCUGCUGUCUGAGCAGAAUUAGUGU |
| 1436 | 14332 | 24332 | CUGGCUUGCUUACUGGUAAAGUAAGCAAGCCAG |
| 1437 | 14333 | 24333 | GUUGCCUUGUACUUGACAAAAGUACAAGGCAAC |
| 1438 | 14334 | 24334 | CAGCAUUUCUGUAGGACAUCUACAGAAAUGCUG |
| 1439 | 14335 | 24335 | UUAUACUUUGAUAAGAUGCUUAUCAAAGUAUAA |
| 1440 | 14336 | 24336 | UUAAGUACUGUCUUCCUUUAAGACAGUACUUAA |
| 1441 | 14337 | 24337 | CUGCAAACUUCCUCAGAGGGAGGAAGUUUGCAG |
| 1442 | 14338 | 24338 | AAGACAGUUUCUCUUUUGGAGAGAAACUGUCUU |
| 1443 | 14339 | 24339 | AUUCAGUUUGUAGGGAGAGCCUACAAACUGAAU |
| 1444 | 14340 | 24340 | UGGAAUGUUUAUACUUUGAGUAUAAACAUUCCA |
| 1445 | 14341 | 24341 | UAACAGGGUCUUCAUGUGUUGAAGACCCUGUUA |
| 1446 | 14342 | 24342 | AGAGAUUGUUGCAUCAAAUAUGCAACAAUCUCU |
| 1447 | 14343 | 24343 | GAGUCAUCUGCAUUUGCAUAAUGCAGAUGACUC |
| 1448 | 14344 | 24344 | GAAUGUUUAUAUUUAGCAGAAAUAUAAACAUUC |
| 1449 | 14345 | 24345 | GGAACAAGAUGAACUUCCCGUUCAUCUUGUUCC |
| 1450 | 14346 | 24346 | GGUAUUUCUGCCUCUUCAGGAGGCAGAAAUACC |
| 1451 | 14347 | 24347 | CAGAACUGCAUCCCAGAAGGGGAUGCAGUUCUG |
| 1452 | 14348 | 24348 | UUCCGGUGUCCAAUAACCUAUUGGACACCGGAA |
| 1453 | 14349 | 24349 | CAUCAAUUGUUUGUGCAUUACAAACAAUUGAUG |
| 1454 | 14350 | 24350 | AAUACUCUUUCCAAGGGCUUUGGAAAGAGUAUU |
| 1455 | 14351 | 24351 | UCAAAUGCUUCAGUGUAUCACUGAAGCAUUUGA |
| 1456 | 14352 | 24352 | AAGCAAGUGCCACUAAUUCAGUGGCACUUGCUU |
| 1457 | 14353 | 24353 | UUAAUAGAGAUUGUUGCAUACAAUCUCUAUUAA |
| 1458 | 14354 | 24354 | AUAGAGAUUGUUGCAUCAAGCAACAAUCUCUAU |
| 1459 | 14355 | 24355 | GAACUCCUUUCGUCUGCUAGACGAAAGGAGUUC |
| 1460 | 14356 | 24356 | GUCAUUUUAUAAUUAUGUAAAUUAUAAAAUGAC |
| 1461 | 14357 | 24357 | AAGAAUUGAAAUACUCUUUGUAUUUCAAUUCUU |
| 1462 | 14358 | 24358 | AAAGCCUUUCUAAUUCCAAAUUAGAAAGGCUUU |
| 1463 | 14359 | 24359 | UCAAUAUUUAACCAGACUGUGGUUAAAUAUUGA |
| 1464 | 14360 | 24360 | UGGUAUAUUCAUUUCCAGGAAAUGAAUAUACCA |
| 1465 | 14361 | 24361 | UGAAACAAUUGAACGAAACGUUCAAUUGUUUCA |
| 1466 | 14362 | 24362 | AAUAUCUUGCUUUUAUAGUAAAAGCAAGAUAUU |
| 1467 | 14363 | 24363 | AGAGAUUGUCAGAUCCAAUAUCUGACAAUCUCU |
| 1468 | 14364 | 24364 | AGCAAUUCCAUUUAUCAACUAAAUGGAAUUGCU |
| 1469 | 14365 | 24365 | UUAUCAGGAUAACUUUUAAAGUUAUCCUGAUAA |
| 1470 | 14366 | 24366 | CGAAUUUCUGGCUUGCUUAAAGCCAGAAAUUCG |
| 1471 | 14367 | 24367 | UCAAGUUCAGACUGGUGAGCAGUCUGAACUUGA |
| 1472 | 14368 | 24368 | AGAGGUACUGGUUUUGUGAAAACCAGUACCUCU |
| 1473 | 14369 | 24369 | GGUAUUUUCUUUCAAGCAAUGAAAGAAAAUACC |
| 1474 | 14370 | 24370 | AGGUACUGGUUUUGUGAACCAAAACCAGUACCU |
| 1475 | 14371 | 24371 | CAGAUUCCCUCCACAGCAGGUGGAGGGAAUCUG |
| 1476 | 14372 | 24372 | UAGUCAGCAUUUCUGUAGGAGAAAUGCUGACUA |
| 1477 | 14373 | 24373 | AUUAGCACGGAGCUGGCUUAGCUCCGUGCUAAU |
| 1478 | 14374 | 24374 | UAAGAGACACAGUUUGGCCAACUGUGUCUCUUA |
| 1479 | 14375 | 24375 | GAACAUGUUGUGUCUCUAGGACACAACAUGUUC |
| 1480 | 14376 | 24376 | CAUAAGUGCAAACUGUAUGAGUUUGCACUUAUG |
| 1481 | 14377 | 24377 | CAAAUUCAGUUUGUAGGGAACAAACUGAAUUUG |
| 1482 | 14378 | 24378 | ACAAGCAGUCCUUUUACACAAAGGACUGCUUGU |
| 1483 | 14379 | 24379 | AAGUAUUCCCAAAAGGCCCUUUUGGGAAUACUU |
| 1484 | 14380 | 24380 | CAAUCACAGUAAAGGCUGUCUUUACUGUGAUUG |
| 1485 | 14381 | 24381 | AAUAGCUUUCCCUUUUGACAAGGGAAAGCUAUU |
| 1486 | 14382 | 24382 | UAUUGGUUGAUACUGUGAAAGUAUCAACCAAUA |
| 1487 | 14383 | 24383 | CAGAAAUGGCCAAUGUAAAAUUGGCCAUUUCUG |
| 1488 | 14384 | 24384 | UUGUAAUCAGAGUUUCCGUAACUCUGAUUACAA |
| 1489 | 14385 | 24385 | ACUCAGGCUUUAAUGAUCAAUUAAAGCCUGAGU |
| 1490 | 14386 | 24386 | CAGCUAUUUCUUCUAUCUUAGAAGAAAUAGCUG |
| 1491 | 14387 | 24387 | AUAUCUUGCUUUUAUAGUAUAAAAGCAAGAUAU |
| 1492 | 14388 | 24388 | ACAAGGUUCAUCAUUUUCUAUGAUGAACCUUGU |
| 1493 | 14389 | 24389 | AUUGUGUUUUGCAUUGCUGAUGCAAAACACAAU |
| 1494 | 14390 | 24390 | GCCACAAUAAAGAAUUACAUUCUUUAUUGUGGC |
| 1495 | 14391 | 24391 | GGUGGAUUACCUUUAACCAAAAGGUAAUCCACC |
| 1496 | 14392 | 24392 | CUUCUCUCUUCAAAGCUGAUUUGAAGAGAGAAG |
| 1497 | 14393 | 24393 | UGGGAUGCUUCAAUAUCCUAUUGAAGCAUCCCA |
| 1498 | 14394 | 24394 | AAAUCUUCUAAACUGUAGUAGUUUAGAAGAUUU |
| 1499 | 14395 | 24395 | AAAUUCAGUUUGUAGGGAGUACAAACUGAAUUU |
| 1500 | 14396 | 24396 | CUGUCAUUUUAUAAUUAUGUUAUAAAAUGACAG |
| 1501 | 14397 | 24397 | AAUGCUUUGAUACAACUUCUGUAUCAAAGCAUU |
| 1502 | 14398 | 24398 | UCCUCUUUAUAUUUAGCCUAAAUAUAAAGAGGA |
| 1503 | 14399 | 24399 | GCAAAUUCAUCUAAAUUAGUUAGAUGAAUUUGC |
| 1504 | 14400 | 24400 | UUCCAAAUACACAUAAGAAAUGUGUAUUUGGAA |

TABLE 3a
Modified CFB hairpin constructs

| SEQ ID | Construct | |
|---|---|---|
| No. | ID NO: | |
| 1505 | 1 | PmU.fA.mG.mA.mA.mA.mA.mC.mC.mC.mA.mA.mA.fU.mC |
| | | .mC.mU.mC.mA.mG.mA.fU.fU.fU.mG.mG.mG.mU.mU.mU |
| | | .mU.mC.mU.mA |
| 1506 | 2 | PmU.fC.mU.mG.mU.mC.mU.mG.mA.mU.mC.mC.mA.fU.mC |
| | | .mU.mA.mG.mC.mG.mA.fU.fG.fG.mA.mU.mC.mA.mG.mA |
| | | .mC.mA.mG.mA |
| 1507 | 3 | PmU.fA.mC.mC.mA.mU.mG.mC.mC.mA.mC.mA.mG.fA.mG |
| | | .mA.mC.mU.mC.mC.mU.fC.fU.fG.mU.mG.mG.mC.mA.mU |
| | | .mG.mG.mU.mA |
| 1508 | 4 | PmU.fA.mU.mC.mC.mA.mU.mC.mU.mA.mG.mC.mA.fC.mC |
| | | .mA.mG.mG.mU.mG.mG.fU.fG.fC.mU.mA.mG.mA.mU.mG |
| | | .mG.mA.mU.mA |
| 1509 | 5 | PmU.fA.mA.mA.mC.mC.mC.mA.mA.mA.mU.mC.mC.fU.mC |
| | | .mA.mU.mC.mU.mG.mA.fG.fG.fA.mU.mU.mU.mG.mG.mG |
| | | .mU.mU.mU.mA |
| 1510 | 6 | PmU.fC.mC.mA.mU.mC.mU.mA.mG.mC.mA.mC.mC.fA.mG |
| | | .mG.mU.mA.mG.mC.mU.fG.fG.fU.mG.mC.mU.mA.mG.mA |
| | | .mU.mG.mG.mA |
| 1511 | 7 | PmU.f.A.mA.m.A.mA.mC.mC.mC.mA.mA.mA.mU.mC.fC. |
| | | mU.mC.mA.mU.mC.mA.mG.fG.fA.fU.mU.mU.mG.mG.mG. |
| | | mU.mU.mU.mU.mA |
| 1512 | 8 | PmU.fG.mU.mC.mU.mG.mA.mU.mC.mC.mA.mU.mC.fU.mA |
| | | .mG.mC.mA.mC.mU.mA.fG.fA.fU.mG.mG.mA.mU.mC.mA |
| | | .mG.mA.mC.mA |
| 1513 | 9 | PmU.fA.mC.mC.mC.mA.m.A.mA.mU.mC.mC.mU.mC.fA.m |
| | | U.mC.mU.mU.mG.mA.mU.fG.fA.fG.mG.mA.mU.mU.mU.m |
| | | G.mG.mG.mU.mA |
| 1514 | 10 | PmU.fU.mC.mC.mA.mU.mC.mU.mA.mG.mC.mA.mC.fC.mA |
| | | .mG.mG.mU.mA.mU.mG.fG.fU.fG.mC.mU.mA.mG.mA.mU |
| | | .mG.mG.mA.mA |
| 1515 | 11 | PmU.f.A.m.A.mC.mC.mC.mA.mA.mA.mU.mC.mC.mU.fC. |
| | | mA.mU.mC.mU.mU.mU.mG.fA.fG.fG.mA.mU.mU.mU.mG. |
| | | mG.mG.mU.mU.mA |
| 1516 | 12 | PmU.fC.mA.mU.mG.mC.mC.mA.mC.mA.mG.mA.mG.fA.mC |
| | | .mU.mC.mA.mG.mG.mU.fC.fU.fC.mU.mG.mU.mG.mG.mC |
| | | .mA.mU.mG.mA |
| 1517 | 13 | PmU.fU.mG.mC.mC.mA.mC.mA.mG.mA.mG.mA.mC.fU.mC |
| | | .mA.mG.mA.mG.mG.mA.fG.fU.fC.mU.mC.mU.mG.mU.mG |
| | | .mG.mC.mA.mA |
| 1518 | 14 | PmU.fA.mU.mG.mA.mU.mG.mA.mC.mA.mU.mG.mG.fC.mG |
| | | .mG.mG.mU.mG.mC.mG.fC.fC.fA.mU.mG.mU.mC.mA.mU |
| | | .mC.mA.mU.mA |
| 1519 | 15 | PmU.fU.mC.mC.mA.mU.mA.mU.mC.mC.mU.mU.mG.fA.mC |
| | | .mU.mU.mU.mG.mG.mU.fC.fA.fA.mG.mG.mA.mU.mA.mU |
| | | .mG.mG.mA.mA |
| 1520 | 16 | PmU.fA.mC.mA.mC.mC.mA.mA.mC.mU.mU.mG.mA.fA.mU |
| | | .mG.mA.mA.mA.mA.mU.fU.fC.fA.mA.mG.mU.mU.mG.mG |
| | | .mU.mG.mU.mA |
| 1521 | 17 | PmU.fG.mC.mC.mA.mC.mA.mG.mA.mG.mA.mC.mU.fC.mA |
| | | .mG.mA.mG.mA.mU.mG.fA.fG.fU.mC.mU.mC.mU.mG.mU |
| | | .mG.mG.mC.mA |
| 1522 | 18 | PmU.fC.mC.mA.mU.mG.mC.mC.mA.mC.mA.mG.mA.fG.mA |
| | | .mC.mU.mC.mA.mU.mC.fU.fC.fU.mG.mU.mG.mG.mC.mA |
| | | .mU.mG.mG.mA |
| 1523 | 19 | PmU.fC.mA.mU.mC.mU.mA.mG.mC.mA.mC.mC.mA.fG.mG |
| | | .mU.mA.mG.mA.mC.mC.fU.fG.fG.mU.mG.mC.mU.mA.mG |
| | | .mA.mU.mG.mA |
| 1524 | 20 | PmU.fU.mU.mC.mC.mA.mU.mA.mU.mC.mC.mU.mU.fG.mA |
| | | .mC.mU.mU.mU.mU.mC.fA.fA.fG.mG.mA.mU.mA.mU.mG |
| | | .mG.mA.mA.mA |
| 1525 | 21 | PmU.fG.mA.mU.mC.mC.mA.mU.mC.mU.mA.mG.mC.fA.mC |
| | | .mC.mA.mG.mG.mG.mU.fG.fC.fU.mA.mG.mA.mU.mG.mG |
| | | .mA.mU.mC.mA |
| 1526 | 22 | PmU.fC.mC.mA.mC.mA.mG.mA.mG.mA.mC.mU.mC.fA.mG |
| | | .mA.mG.mA.mC.mC.mU.fG.fA.fG.mU.mC.mU.mC.mU.mG |
| | | .mU.mG.mG.mA |
| 1527 | 23 | PmU.fU.mG.mA.mU.mC.mC.mA.mU.mC.mU.mA.mG.fC.mA |
| | | .mC.mC.mA.mG.mU.mG.fC.fU.fA.mG.mA.mU.mG.mG.mA |
| | | .mU.mC.mA.mA |
| 1528 | 24 | PmU.fA.mC.mC.mU.mC.mC.mU.mU.mC.mC.mG.mA.fG.mU |
| | | .mC.mA.mG.mC.mA.mC.fU.fC.fG.mG.mA.mA.mG.mG.mA |
| | | .mG.mG.mU.mA |
| 1529 | 25 | PmU.fU.mC.mU.mG.mA.mU.mC.mC.mA.mU.mC.mU.fA.mG |
| | | .mC.mA.mC.mC.mC.mU.fA.fG.fA.mU.mG.mG.mA.mU.mC |
| | | .mA.mG.mA.mA |
| 1530 | 26 | PmU.fU.mC.mU.mU.mG.mG.mC.mA.mG.mG.mA.mA.fG.mG |
| | | .mC.mU.mC.mC.mC.mC.fU.fU.fC.mC.mU.mG.mC.mC.mA |
| | | .mA.mG.mA.mA |
| 1531 | 27 | PmU.fU.mC.mU.mA.mG.mC.mA.mC.mC.mA.mG.mG.fU.mA |
| | | .mG.mA.mU.mG.mU.mA.fC.fC.fU.mG.mG.mU.mG.mC.mU |
| | | .mA.mG.mA.mA |
| 1532 | 28 | PmU.fA.m.A.mG.mU.mA.mC.mU.mC.mA.mG.mA.mC.fA.m |
| | | C.mC.mA.mC.mA.mG.mU.fG.fU.fC.mU.mG.mA.mG.mU.m |
| | | A.mC.mU.mU.mA |
| 1533 | 29 | PmU.fU.mG.mU.mC.mU.mG.mA.mU.mC.mC.mA.mU.fC.mU |
| | | .mA.mG.mC.mA.mA.mG.fA.fU.fG.mG.mA.mU.mC.mA.mG |
| | | .mA.mC.mA.mA |
| 1534 | 30 | PmU.fA.mU.mC.mU.mA.mG.mC.mA.mC.mC.mA.mG.fG.mU |
| | | .mA.mG.mA.mU.mA.mC.fC.fU.fG.mG.mU.mG.mC.mU.mA |
| | | .mG.mA.mU.mA |
| 1535 | 31 | PmU.fC.mA.mA.mA.mU.mC.mC.mU.mC.mA.mU.mC.fU.mU |
| | | .mG.mG.mA.mG.mA.m.A.fG.fA.fU.mG.mA.mG.mG.mA.m |
| | | U.mU.mU.mG.mA |
| 1536 | 32 | PmU.fA.mU.mA.mG.mU.mC.mA.mU.mA.mA.mA.mA.fU.mU |
| | | .mC.mA.mG.mG.mA.mA.fU.fU.fU.mU.mA.mU.mG.mA.mC |
| | | .mU.mA.mU.mA |
| 1537 | 33 | PmU.fA.mG.mG.mA.mU.mG.mA.mU.mG.mA.mC.mA.fU.mG |
| | | .mG.mC.mG.mG.mC.mA.fU.fG.fU.mC.mA.mU.mC.mA.mU |
| | | .mC.mC.mU.mA |
| 1538 | 34 | PmU.fC.mA.mA.mU.mC.mU.mG.mU.mG.mU.mU.mC.fU.mG |
| | | .mG.mC.mA.mC.mC.mA.fG.fA.fA.mC.mA.mC.mA.mG.mA |
| | | .mU.mU.mG.mA |
| 1539 | 35 | PmU.fU.mG.mA.mG.mC.mU.mU.mG.mA.mU.mC.mA.fG.mG |
| | | .mG.mC.mA.mA.mC.mC.fU.fG.fA.mU.mC.mA.mA.mG.mC |
| | | .mU.mC.mA.mA |
| 1540 | 36 | PmU.fA.mG.mU.mG.mG.mA.mA.mA.mG.mA.mG.m.A.fU.m |
| | | C.mU.mC.mA.mU.mG.mA.fU.fC.fU.mC.mU.mU.mU.mC.m |
| | | C.mA.mC.mU.mA |
| 1541 | 37 | PmU.fA.mG.mA.mU.mG.mU.mU.mC.mA.mU.mG.mG.fA.mG |
| | | .mC.mC.mU.mG.mC.mU.fC.fC.fA.mU.mG.mA.mA.mC.mA |
| | | .mU.mC.mU.mA |
| 1542 | 38 | PmU.fG.mC.mA.mA.mG.mU.mG.mG.mU.mA.mG.mU.fU.mG |
| | | .mG.mA.mG.mG.mC.mA.fA.fC.fU.mA.mC.mC.mA.mC.mU |
| | | .mU.mG.mC.mA |
| 1543 | 39 | PmU.fC.mA.mC.mA.mC.mC.mA.mU.mA.mA.mC.mU.fU.mG |
| | | .mC.mC.mA.mC.mC.mA.fA.fG.fU.mU.mA.mU.mG.mG.mU |
| | | .mG.mU.mG.mA |
| 1544 | 40 | PmU.fA.mA.mA.mG.mA.mG.mA.mU.mC.mU.mC.mA.fU.mC |
| | | .mA.mC.mU.mC.mG.mA.fU.fG.fA.mG.mA.mU.mC.mU.mC |
| | | .mU.mU.mU.mA |
| 1545 | 41 | PmU.fU.mC.mA.mA.mC.mU.mU.mG.mU.mG.mG.mU.fC.mU |
| | | .mU.mC.mA.mU.mA.mG.fA.fC.fC.mA.mC.mA.mA.mG.mU |
| | | .mU.mG.mA.mA |
| 1546 | 42 | PmU.f.A.m.A.m.A.mC.mG.m.A.mC.mU.mU.mC.mU.mC.f |
| | | U.mU.mG.mU.mG.mA.mA.mA.fG.fA.fG.mA.mA.mG.mU.m |
| | | C.mG.mU.mU.mU.mA |
| 1547 | 43 | PmU.fG.mU.mA.mU.mG.mU.mG.mG.mC.mA.mU.mA.fU.mG |
| | | .mU.mC.mA.mC.mC.mA.fU.fA.fU.mG.mC.mC.mA.mC.mA |
| | | .mU.mA.mC.mA |
| 1548 | 44 | PmU.fG.mU.mC.mU.mU.mU.mC.mU.mU.mG.mG.mA.fA.mG |
| | | .mC.mC.mA.mA.mC.mU.fU.fC.fC.mA.mA.mG.mA.mA.mA |
| | | .mG.mA.mC.mA |
| 1549 | 45 | PmU.fC.mA.mU.mC.mC.mA.mG.mA.mU.mA.mA.mU.fC.mC |
| | | .mU.mC.mC.mC.mG.mG.fA.fU.fU.mA.mU.mC.mU.mG.mG |
| | | .mA.mU.mG.mA |
| 1550 | 46 | PmU.fU.mU.mG.mA.mC.mU.mU.mU.mG.mU.mC.mA.fU.mA |
| | | .mG.mC.mC.mU.mU.mA.fU.fG.fA.mC.mA.mA.mA.mG.mU |
| | | .mC.mA.mA.mA |
| 1551 | 47 | PmU.fA.m.A.mA.mC.mU.mC.mC.mA.mG.mA.mC.mC.fU.m |
| | | A.mG.mA.mC.mC.mU.mA.fG.fG.fU.mC.mU.mG.mG.mA.m |
| | | G.mU.mU.mU.mA |
| 1552 | 48 | PmU.fA.mU.mA.mA.mC.mU.mU.mG.mC.mC.m.A.mC.fC.m |
| | | U.mU.mC.mU.mC.mA.mG.fG.fU.fG.mG.mC.mA.mA.mG.m |
| | | U.mU.mA.mU.mA |
| 1553 | 49 | PmU.fC.mA.mU.mA.mG.mU.mC.mA.mU.mA.mA.mA.fA.mU |
| | | .mU.mC.mA.mG.mA.mU.fU.fU.fU.mA.mU.mG.mA.mC.mU |
| | | .mA.mU.mG.mA |
| 1554 | 50 | PmU.fU.mG.mG.mC.mU.mC.mC.mU.mG.mU.mG.mA.fA.mG |
| | | .mU.mU.mG.mC.mC.mU.fU.fC.fA.mC.mA.mG.mG.mA.mG |
| | | .mC.mC.mA.mA |
| 1555 | 51 | PmU.fA.m.A.mA.mG.mU.mA.mC.mU.mC.mA.mG.m.A.fC. |
| | | mA.mC.mC.mA.mC.mU.mG.fU.fC.fU.mG.mA.mG.mU.mA. |
| | | mC.mU.mU.mU.mA |
| 1556 | 52 | PmU.fG.mC.mU.mC.mA.mU.mU.mG.mU.mC.mU.mU.fU.mC |
| | | .mU.mU.mG.mG.mG.mA.fA.fA.fG.mA.mC.mA.mA.mU.mG |
| | | .mA.mG.mC.mA |
| 1557 | 53 | PmU.fU.mA.mA.m.A.mA.mU.mU.mC.mA.mG.mG.mA.fA.m |
| | | U.mU.mC.mC.mU.mA.mU.fU.fC.fC.mU.mG.mA.mA.mU.m |
| | | U.mU.mU.mA.mA |
| 1558 | 54 | PmU.fG.mA.mG.mA.mU.mC.mU.mU.mG.mG.mC.mC.fU.mG |
| | | .mC.mC.mA.mU.mC.mA.fG.fG.fC.mC.mA.mA.mG.mA.mU |
| | | .mC.mU.mC.mA |
| 1559 | 55 | PmU.fG.mA.mG.mC.mA.mU.mC.mU.mC.mU.mC.mU.fC.mA |
| | | .mC.mA.mG.mC.mU.mG.fA.fG.fA.mG.mA.mG.mA.mU.mG |
| | | .mC.mU.mC.mA |
| 1560 | 56 | PmU.fA.m.A.mC.mC.mG.mU.mC.mA.mU.mA.mG.mC.fA.m |
| | | G.mU.mG.mG.mA.mC.mU.fG.fC.fU.mA.mU.mG.mA.mC.m |
| | | G.mG.mU.mU.mA |
| 1561 | 57 | PmU.fA.mG.mA.mG.mC.mU.mU.mU.mG.mA.mU.mA.fU.mC |
| | | .mC.mU.mG.mU.mG.mA.fU.fA.fU.mC.mA.mA.mA.mG.mC |
| | | .mU.mC.mU.mA |
| 1562 | 58 | PmU.fA.mC.mA.mA.mU.mG.mU.mG.mC.mU.mG.mC.fU.mG |
| | | .mU.mC.mA.mG.mC.mA.fG.fC.fA.mG.mC.mA.mC.mA.mU |
| | | .mU.mG.mU.mA |
| 1563 | 59 | PmU.fG.mG.mU.mA.mC.mG.mG.mG.mU.mA.mG.mA.fA.mG |
| | | .mC.mC.mA.mG.mC.mU.fU.fC.fU.mA.mC.mC.mC.mG.mU |
| | | .mA.mC.mC.mA |
| 1564 | 60 | PmU.fC.mA.mG.mA.mC.mC.mU.mA.mG.mA.mC.mC.fU.mG |
| | | .mG.mU.mC.mA.mC.mA.fG.fG.fU.mC.mU.mA.mG.mG.mU |
| | | .mC.mU.mG.mA |
| 1565 | 61 | PmU.fU.mU.mC.mU.mC.mU.mU.mG.mU.mG.mA.mA.fC.mU |
| | | .mA.mU.mC.mA.mA.mG.fU.fU.fC.mA.mC.mA.mA.mG.mA |
| | | .mG.mA.mA.mA |
| 1566 | 62 | PmU.fU.mU.mC.mA.mG.mG.mA.m.A.mU.mU.mC.mC.fU.m |
| | | G.mC.mU.mU.mC.mC.m.A.fG.fG.fA.mA.mU.mU.mC.mC. |
| | | mU.mG.mA.mA.mA |
| 1567 | 63 | PmU.fC.mC.mA.mG.mG.mU.mU.mU.mU.mC.mC.mA.fU.mA |
| | | .mU.mC.mC.mU.mU.mA.fU.fG.fG.mA.mA.mA.mA.mC.mC |
| | | .mU.mG.mG.mA |
| 1568 | 64 | PmU.fC.mA.mA.mC.mU.mU.mG.mA.mA.mU.mG.mA.fA.mA |
| | | .mC.mG.mA.mC.mU.mU.fU.fC.fA.mU.mU.mC.mA.mA.mG |
| | | .mU.mU.mG.mA |
| 1569 | 65 | PmU.fG.mU.mG.mC.mU.mG.mC.mU.mG.mU.mC.mA.fG.mC |
| | | .mA.mC.mA.mA.mG.mC.fU.fG.fA.mC.mA.mG.mC.mA.mG |
| | | .mC.mA.mC.mA |
| 1570 | 66 | PmU.fG.m.A.mC.mC.mU.mC.mC.mU.mU.mC.mC.mG.fA.m |
| | | G.mU.mC.mA.mG.mC.mU.fC.fG.fG.mA.mA.mG.mG.mA.m |
| | | G.mG.mU.mC.mA |
| 1571 | 67 | PmU.fC.mA.mA.mU.mU.mA.mA.mG.mU.mU.mG.mA.fC.mU |
| | | .mA.mG.mA.mC.mA.mG.fU.fC.fA.mA.mC.mU.mU.mA.mA |
| | | .mU.mU.mG.mA |
| 1572 | 68 | PmU.fU.mG.mA.mC.mA.mC.mG.mU.mU.mC.mG.mC.fC.mG |
| | | .mC.mU.mG.mG.mC.mG.fG.fC.fG.mA.mA.mC.mG.mU.mG |
| | | .mU.mC.mA.mA |
| 1573 | 69 | PmU.fC.mA.mU.mU.mG.mU.mC.mU.mU.mU.mC.mU.fU.mG |
| | | .mG.mA.mA.mG.mC.mA.fA.fG.fA.m.A.mA.mG.mA.mC.m |
| | | A.mA.mU.mG.mA |
| 1574 | 70 | PmU.fC.mC.mA.mA.mC.mU.mU.mG.mA.mA.mU.mG.fA.mA |
| | | .mA.mC.mG.mA.mU.mU.fC.fA.fU.mU.mC.mA.mA.mG.mU |
| | | .mU.mG.mG.mA |
| 1575 | 71 | PmU.fC.mA.mC.mA.mA.mA.mG.mU.mA.mC.mU.mC.fA.mG |
| | | .mA.mC.mA.mC.mC.mU.fG.fA.fG.mU.mA.mC.mU.mU.mU |
| | | .mG.mU.mG.mA |
| 1576 | 72 | PmU.fU.mG.mC.mA.mG.mU.mG.mG.mU.mA.mG.mG.fU.mG |
| | | .mA.mC.mG.mC.mC.mA.fC.fC.fU.mA.mC.mC.mA.mC.mU |
| | | .mG.mC.mA.mA |
| 1577 | 73 | PmU.fU.mC.mA.mU.mG.mA.mG.mG.mA.mU.mG.mA.fU.mG |
| | | .mA.mC.mA.mU.mC.mA.fU.fC.fA.mU.mC.mC.mU.mC.mA |
| | | .mU.mG.mA.mA |
| 1578 | 74 | PmU.fU.mU.mC.mA.mA.mC.mU.mU.mG.mU.mG.mG.fU.mC |
| | | .mU.mU.mC.mA.mG.mA.fC.fC.fA.mC.mA.mA.mG.mU.mU |
| | | .mG.mA.mA.mA |
| 1579 | 75 | PmU.fG.mU.mA.mG.mU.mU.mG.mG.mA.mG.mG.mA.fA.mG |
| | | .mC.mC.mU.mC.mC.mU.fU.fC.fC.mU.mC.mC.mA.mA.mC |
| | | .mU.mA.mC.mA |
| 1580 | 76 | PmU.fC.mA.mU.mG.mC.mU.mG.mU.mA.mC.mA.mC.fU.mG |
| | | .mC.mC.mU.mG.mC.mA.fG.fU.fG.mU.mA.mC.mA.mG.mC |
| | | .mA.mU.mG.mA |
| 1581 | 77 | PmU.fU.mG.mU.mC.mU.mU.mU.mC.mU.mU.mG.mG.fA.mA |
| | | .mG.mC.mC.mA.mU.mU.fC.fC.fA.mA.mG.mA.mA.mA.mG |
| | | .mA.mC.mA.mA |
| 1582 | 78 | PmU.fC.mG.mA.mC.mU.mC.mC.mU.mU.mC.mU.mA.fU.mG |
| | | .mG.mU.mC.mU.mC.mA.fU.fA.fG.mA.mA.mG.mG.mA.mG |
| | | .mU.mC.mG.mA |
| 1583 | 79 | PmU.fG.mA.mC.mA.mU.mC.mC.mA.mG.mA.mU.mA.fA.mU |
| | | .mC.mC.mU.mC.mA.mU.fU.fA.fU.mC.mU.mG.mG.mA.mU |
| | | .mG.mU.mC.mA |
| 1584 | 80 | PmU.fU.mG.mA.mG.mA.mU.mC.mU.mU.mG.mG.mC.fC.mU |
| | | .mG.mC.mC.mA.mA.mG.fG.fC.fC.mA.mA.mG.mA.mU.mC |
| | | .mU.mC.mA.mA |
| 1585 | 81 | PmU.fA.mC.mG.mC.mU.mG.mU.mC.mU.mU.mC.mA.fA.mG |
| | | .mG.mC.mG.mG.mC.mU.fU.fG.fA.mA.mG.mA.mC.mA.mG |
| | | .mC.mG.mU.mA |
| 1586 | 82 | PmU.fA.mG.mA.mC.mA.mG.mG.mA.m.A.mA.mG.mC.fU.m |
| | | U.mC.mG.mG.mC.mA.mA.fG.fC.fU.mU.mU.mC.mC.mU.m |
| | | G.mU.mC.mU.mA |
| 1587 | 83 | PmU.fU.mU.mG.mA.mA.mC.mA.mC.mA.mU.mG.mU.fU.mG |
| | | .mC.mU.mC.mA.mC.m.A.fA.fC.fA.mU.mG.mU.mG.mU.m |
| | | U.mC.mA.mA.mA |
| 1588 | 84 | PmU.fA.mU.mA.m.A.mA.mA.mU.mU.mC.mA.mG.mG.fA.m |
| | | .A.mU.mU.mC.mC.mU.mU.fC.fC.fU.mG.mA.mA.mU.mU. |
| | | mU.mU.mA.mU.mA |
| 1589 | 85 | PmU.fC.mC.mC.mA.mA.mA.mU.mC.mC.mU.mC.mA.fU.mC |
| | | .mU.mU.mG.mG.mG.mA.fU.fG.fA.mG.mG.mA.mU.mU.mU |
| | | .mG.mG.mG.mA |
| 1590 | 86 | PmU.fA.mA.mG.mA.mG.mA.mU.mC.mU.mC.mA.mU.fC.mA |
| | | .mC.mU.mC.mA.mU.mG.fA.fU.fG.mA.mG.mA.mU.mC.mU |
| | | .mC.mU.mU.mA |
| 1591 | 87 | PmU.fA.mA.mA.mG.mC.mA.mU.mU.mG.mA.mU.mG.fU.mU |
| | | .mC.mA.mC.mU.mA.mA.fC.fA.fU.mC.mA.mA.mU.mG.mC |
| | | .mU.mU.mU.mA |
| 1592 | 88 | PmU.fA.mG.mG.mA.mA.mU.mU.mC.mC.mU.mG.mC.fU.mU |
| | | .mC.mU.mU.mU.mA.mA.fG.fC.fA.mG.mG.mA.mA.mU.mU |
| | | .mC.mC.mU.mA |
| 1593 | 89 | PmU.fA.mU.mG.mA.mA.mG.mG.mA.mG.mU.mC.mU.fU.mG |
| | | .mG.mC.mA.mG.mC.mA.fA.fG.fA.mC.mU.mC.mC.mU.mU |
| | | .mC.mA.mU.mA |
| 1594 | 90 | PmU.fA.mA.mG.mC.mU.mU.mC.mG.mG.mC.mC.mA.fC.mC |
| | | .mU.mC.mU.mU.mG.mG.fU.fG.fG.mC.mC.mG.mA.mA.mG |
| | | .mC.mU.mU.mA |
| 1595 | 91 | PmU.fU.mG.mA.mC.mU.mU.mU.mG.mU.mC.mA.mU.fA.mG |
| | | .mC.mC.mU.mG.mC.mU.fA.fU.fG.mA.mC.mA.mA.mA.mG |
| | | .mU.mC.mA.mA |
| 1596 | 92 | PmU.fU.mC.mC.mA.mA.mG.mC.mU.mG.mA.mA.m.A.fC.m |
| | | U.mC.mC.mA.mG.mA.mG.fU.fU.fU.mC.mA.mG.mC.mU.m |
| | | U.mG.mG.mA.mA |
| 1597 | 93 | PmU.fC.mC.mA.mA.mA.mU.mC.mC.mU.mC.mA.mU.fC.mU |
| | | .mU.mG.mG.mA.mA.mG.fA.fU.fG.mA.mG.mG.mA.mU.mU |
| | | .mU.mG.mG.mA |
| 1598 | 94 | PmU.fC.mA.mG.mC.mU.mG.mU.mU.mU.mU.mA.mA.fU.mU |
| | | .mC.mA.mA.mU.mA.mA.fU.fU.fA.mA.mA.mA.mC.mA.mG |
| | | .mC.mU.mG.mA |
| 1599 | 95 | PmU.fA.mA.mC.mG.mA.mC.mU.mU.mC.mU.mC.mU.fU.mG |
| | | .mU.mG.mA.mA.mC.m.A.fA.fG.fA.mG.mA.mA.mG.mU.m |
| | | C.mG.mU.mU.mA |
| 1600 | 96 | PmU.fC.mC.mG.mG.mA.mA.mC.mA.mU.mC.mC.mA.fA.mG |
| | | .mC.mG.mG.mG.mC.mU.fU.fG.fG.mA.mU.mG.mU.mU.mC |
| | | .mC.mG.mG.mA |
| 1601 | 97 | PmU.fC.mA.mA.mA.mC.mA.mC.mA.mU.mA.mG.mA.fC.mA |
| | | .mU.mC.mC.mA.mU.mG.fU.fC.fU.mA.mU.mG.mU.mG.mU |
| | | .mU.mU.mG.mA |
| 1602 | 98 | PmU.fU.mU.mC.mA.mC.mA.mC.mC.mA.mU.mA.mA.fC.mU |
| | | .mU.mG.mC.mC.mA.mG.fU.fU.fA.mU.mG.mG.mU.mG.mU |
| | | .mG.mA.mA.mA |
| 1603 | 99 | PmU.fU.mC.mU.mC.mU.mU.mG.mU.mG.mA.mA.mC.fU.mA |
| | | .mU.mC.mA.mA.mU.mA.fG.fU.fU.mC.mA.mC.mA.mA.mG |
| | | .mA.mG.mA.mA |
| 1604 | 100 | PmU.fA.mU.mU.mC.mA.mG.mG.mA.mA.mU.mU.mC.fC.mU |
| | | .mG.mC.mU.mU.mA.mG.fG.fA.fA.mU.mU.mC.mC.mU.mG |
| | | .mA.mA.mU.mA |
| 1605 | 101 | PmU.fG.mA.mC.mA.mC.mU.mU.mU.mG.mA.mC.mC.fC.mA |
| | | .mA.mA.mU.mU.mU.mG.fG.fG.fU.mC.mA.mA.mA.mG.mU |
| | | .mG.mU.mC.mA |
| 1606 | 102 | PmU.fC.mA.mC.mA.mA.mA.mC.mA.mG.mA.mG.mC.fU.mU |
| | | .mU.mG.mA.mU.mA.m.A.fG.fC.fU.mC.mU.mG.mU.mU.m |
| | | U.mG.mU.mG.mA |
| 1607 | 103 | PmU.fC.mA.mA.mA.mC.mA.mG.mA.mG.mC.mU.mU.fU.mG |
| | | .mA.mU.mA.mU.mC.m.A.fA.fA.fG.mC.mU.mC.mU.mG.m |
| | | U.mU.mU.mG.mA |
| 1608 | 104 | PmU.fU.mU.mG.mG.mA.mG.mU.mU.mU.mC.mU.mC.fC.mU |
| | | .mU.mC.mA.mG.mA.mG.fG.fA.fG.mA.mA.mA.mC.mU.mC |
| | | .mC.mA.mA.mA |
| 1609 | 105 | PmU.fU.mC.mA.mC.mA.mC.mC.mA.mU.mA.mA.mC.fU.mU |
| | | .mG.mC.mC.mA.mA.mA.fG.fU.fU.mA.mU.mG.mG.mU.mG |
| | | .mU.mG.mA.mA |
| 1610 | 106 | PmU.fU.mG.mA.mA.mU.mG.mA.mA.mA.mC.mG.mA.fC.mU |
| | | .mU.mC.mU.mC.mA.mG.fU.fC.fG.mU.mU.mU.mC.mA.mU |
| | | .mU.mC.mA.mA |
| 1611 | 107 | PmU.fC.mA.mG.mG.mU.mU.mU.mU.mC.mC.mA.mU.fA.mU |
| | | .mC.mC.mU.mU.mA.mU.fA.fU.fG.mG.mA.mA.mA.mA.mC |
| | | .mC.mU.mG.mA |
| 1612 | 108 | PmU.fG.mC.mA.mU.mC.mU.mC.mU.mC.mU.mC.mA.fC.mA |
| | | .mG.mC.mU.mG.mU.mG.fU.fG.fA.mG.mA.mG.mA.mG.mA |
| | | .mU.mG.mC.mA |
| 1613 | 109 | PmU.fA.mC.mA.mU.mC.mC.mA.mG.mA.mU.mA.m.A.fU.m |
| | | C.mC.mU.mC.mC.mG.mA.fU.fU.fA.mU.mC.mU.mG.mG.m |
| | | A.mU.mG.mU.mA |
| 1614 | 110 | PmU.fC.mG.mA.mG.mU.mU.mG.mU.mU.mC.mC.mC.fU.mC |
| | | .mG.mG.mU.mG.mG.mA.fG.fG.fG.m.A.mA.mC.mA.mA.m |
| | | C.mU.mC.mG.mA |
| 1615 | 111 | PmU.f.A.mC.mA.mC.mA.mU.mG.mU.mU.mG.mC.mU.fC.m |
| | | A.mU.mU.mG.mU.mU.mG.fA.fG.fC.mA.mA.mC.mA.mU.m |
| | | G.mU.mG.mU.mA |
| 1616 | 112 | PmU.fU.mC.mU.mC.mA.mA.mU.mU.mA.mA.mG.mU.fU.mG |
| | | .mA.mC.mU.mA.mC.mA.fA.fC.fU.mU.mA.mA.mU.mU.mG |
| | | .mA.mG.mA.mA |
| 1617 | 113 | PmU.fG.mA.mA.mG.mC.mC.mA.mA.mA.mG.mC.mA.fU.mU |
| | | .mG.mA.mU.mG.mA.mA.fU.fG.fC.mU.mU.mU.mG.mG.mC |
| | | .mU.mU.mC.mA |
| 1618 | 114 | PmU.fG.mC.mA.mG.mU.mG.mG.mA.mA.mA.mG.mA.fG.mA |
| | | .mU.mC.mU.mC.mU.mC.fU.fC.fU.mU.mU.mC.mC.mA.mC |
| | | .mU.mG.mC.mA |
| 1619 | 115 | PmU.f.A.mC.mA.mC.mU.mG.mC.mC.mU.mG.mG.mA.fG.m |
| | | G.mG.mC.mC.mU.mC.mC.fU.fC.fC.mA.mG.mG.mC.mA.m |
| | | G.mU.mG.mU.mA |
| 1620 | 116 | PmU.fU.mA.mG.mA.mC.mC.mU.mG.mG.mU.mC.mA.fC.mA |
| | | .mU.mU.mC.mC.mU.mG.fU.fG.fA.mC.mC.mA.mG.mG.mU |
| | | .mC.mU.mA.mA |
| 1621 | 117 | PmU.fC.mA.mG.mA.mC.mA.mC.mA.m.A.mA.mC.mA.fG.m |
| | | A.mG.mC.mU.mU.mU.mC.fU.fG.fU.mU.mU.mG.mU.mG.m |
| | | U.mC.mU.mG.mA |
| 1622 | 118 | PmU.fG.mA.mG.mU.mU.mU.mC.mU.mC.mC.mU.mU.fC.mA |
| | | .mG.mC.mC.mA.mU.mG.fA.fA.fG.mG.mA.mG.mA.mA.mA |
| | | .mC.mU.mC.mA |
| 1623 | 119 | PmU.fA.mU.mG.mU.mG.mC.mU.mG.mC.mU.mG.mU.fC.mA |
| | | .mG.mC.mA.mC.mU.mG.fA.fC.fA.mG.mC.mA.mG.mC.mA |
| | | .mC.mA.mU.mA |
| 1624 | 120 | PmU.fC.mA.mG.mA.mG.mC.mU.mU.mU.mG.mA.mU.fA.mU |
| | | .mC.mC.mU.mG.mA.mU.fA.fU.fC.mA.mA.mA.mG.mC.mU |
| | | .mC.mU.mG.mA |
| 1625 | 121 | PmU.fG.mA.mU.mA.mU.mC.mC.mU.mG.mU.mG.mC.fA.mG |
| | | .mG.mG.mA.mG.mC.mU.fG.fC.fA.mC.mA.mG.mG.mA.mU |
| | | .mA.mU.mC.mA |
| 1626 | 122 | PmU.fA.mG.mG.mG.mC.mA.mA.mC.mG.mU.mC.mA.fU.mA |
| | | .mG.mU.mC.mA.mU.mA.fU.fG.fA.mC.mG.mU.mU.mG.mC |
| | | .mC.mC.mU.mA |
| 1627 | 123 | PmU.fA.mG.mA.mC.mC.mU.mA.mG.mA.mC.mC.mU.fG.mG |
| | | .mU.mC.mA.mC.mC.mC.fA.fG.fG.mU.mC.mU.mA.mG.mG |
| | | .mU.mC.mU.mA |
| 1628 | 124 | PmU.fA.mG.mU.mA.mC.mU.mC.mA.mG.mA.mC.mA.fC.mC |
| | | .mA.mC.mA.mG.mG.mG.fU.fG.fU.mC.mU.mG.mA.mG.mU |
| | | .mA.mC.mU.mA |
| 1629 | 125 | PmU.fA.mA.mG.mG.mC.mU.mC.mC.mG.mU.mC.mC.fC.mG |
| | | .mC.mU.mC.mC.mC.mG.fG.fG.fA.mC.mG.mG.mA.mG.mC |
| | | .mC.mU.mU.mA |
| 1630 | 126 | PmU.fG.mG.mG.mC.mA.mA.mC.mG.mU.mC.mA.mU.fA.mG |
| | | .mU.mC.mA.mU.mC.mU.fA.fU.fG.mA.mC.mG.mU.mU.mG |
| | | .mC.mC.mC.mA |
| 1631 | 127 | PmU.fC.mU.mG.mU.mU.mU.mU.mA.mA.mU.mU.mC.fA.mA |
| | | .mU.mC.mC.mC.mU.mU.fG.fA.fA.mU.mU.mA.mA.mA.mA |
| | | .mC.mA.mG.mA |
| 1632 | 128 | PmU.fA.mG.mA.mG.mA.mU.mC.mU.mC.mA.mU.mC.fA.mC |
| | | .mU.mC.mA.mC.mG.mU.fG.fA.fU.mG.mA.mG.mA.mU.mC |
| | | .mU.mC.mU.mA |
| 1633 | 129 | PmU.fG.mG.mU.mC.mU.mU.mC.mA.mU.mA.mA.mU.fU.mG |
| | | .mA.mU.mU.mU.mC.mA.fA.fU.fU.mA.mU.mG.mA.mA.mG |
| | | .mA.mC.mC.mA |
| 1634 | 130 | PmU.fC.mA.mU.mA.mU.mC.mU.mU.mG.mG.mC.mU.fU.mC |
| | | .mA.mC.mA.mC.mG.m.A.fA.fG.fC.mC.mA.mA.mG.mA.m |
| | | U.mA.mU.mG.mA |
| 1635 | 131 | PmU.fC.mA.mC.mC.mA.mA.mC.mU.mU.mG.mA.mA.fU.mG |
| | | .mA.mA.mA.mC.mC.mA.fU.fU.fC.mA.mA.mG.mU.mU.mG |
| | | .mG.mU.mG.mA |
| 1636 | 132 | PmU.fA.mG.mC.mU.mG.mU.mU.mU.mU.mA.mA.mU.fU.mC |
| | | .mA.mA.mU.mC.mG.m.A.fA.fU.fU.mA.mA.mA.mA.mC.m |
| | | A.mG.mC.mU.mA |
| 1637 | 133 | PmU.fU.mA.mA.mC.mU.mU.mG.mC.mC.mA.mC.mC.fU.mU |
| | | .mC.mU.mC.mA.mA.mA.fG.fG.fU.mG.mG.mC.mA.mA.mG |
| | | .mU.mU.mA.mA |
| 1638 | 134 | PmU.fU.mG.mA.mG.mC.mA.mG.mG.mU.mA.mC.mC.fU.mG |
| | | .mC.mU.mU.mU.mC.mA.fG.fG.fU.mA.mC.mC.mU.mG.mC |
| | | .mU.mC.mA.mA |
| 1639 | 135 | PmU.fU.mU.mG.mA.mU.mG.mU.mA.mG.m.A.mC.mC.fU.m |
| | | C.mC.mU.mU.mC.mG.mA.fG.fG.fU.mC.mU.mA.mC.mA.m |
| | | U.mC.mA.mA.mA |
| 1640 | 136 | PmU.fG.mG.mC.mA.mA.mG.mU.mG.mG.mU.mA.mG.fU.mU |
| | | .mG.mG.mA.mG.mA.m.A.fC.fU.fA.mC.mC.mA.mC.mU.m |
| | | U.mG.mC.mC.mA |
| 1641 | 137 | PmU.fG.mG.mA.mA.mG.mC.mC.mU.mC.mA.mA.mA.fG.mC |
| | | .mU.mC.mG.mA.mG.mC.fU.fU.fU.mG.mA.mG.mG.mC.mU |
| | | .mU.mC.mC.mA |
| 1642 | 138 | PmU.fA.mA.mU.mG.mA.mC.mA.mG.mU.mA.mA.mU.fU.mG |
| | | .mG.mG.mU.mC.mC.mA.fA.fU.fU.mA.mC.mU.mG.mU.mC |
| | | .mA.mU.mU.mA |
| 1643 | 139 | PmU.fU.mU.mU.mG.mA.mA.mC.mA.mC.mA.mU.mG.fU.mU |
| | | .mG.mC.mU.mC.mA.mA.fC.fA.fU.mG.mU.mG.mU.mU.mC |
| | | .mA.mA.mA.mA |
| 1644 | 140 | PmU.fA.m.A.m.A.mU.mC.mC.mU.mC.mA.mU.mC.mU.fU. |
| | | mG.mG.mA.mG.mU.mC.mA.f.A.fG.fA.mU.mG.mA.mG.mG |
| | | .mA.mU.mU.mU.mA |
| 1645 | 141 | PmU.fG.mG.mA.mG.mU.mU.mU.mC.mU.mC.mC.mU.fU.mC |
| | | .mA.mG.mC.mC.mG.mA.fA.fG.fG.mA.mG.mA.mA.mA.mC |
| | | .mU.mC.mC.mA |
| 1646 | 142 | PmU.fC.mA.mU.mA.mA.mC.mU.mU.mG.mC.mC.mA.fC.mC |
| | | .mU.mU.mC.mU.mG.mG.fU.fG.fG.mC.mA.mA.mG.mU.mU |
| | | .mA.mU.mG.mA |
| 1647 | 143 | PmU.fG.mC.mU.mG.mU.mU.mU.mU.mA.mA.mU.mU.fC.mA |
| | | .mA.mU.mC.mC.mU.mG.fA.fA.fU.mU.mA.mA.mA.mA.mC |
| | | .mA.mG.mC.mA |
| 1648 | 144 | PmU.fA.mA.mG.mC.mU.mC.mG.mA.mG.mU.mU.mG.fU.mU |
| | | .mC.mC.mC.mU.mA.m.A.fC.fA.fA.mC.mU.mC.mG.mA.m |
| | | G.mC.mU.mU.mA |
| 1649 | 145 | PmU.fG.mG.mC.mA.mA.mC.mG.mU.mC.mA.mU.mA.fG.mU |
| | | .mC.mA.mU.mA.mA.mC.fU.fA.fU.mG.mA.mC.mG.mU.mU |
| | | .mG.mC.mC.mA |
| 1650 | 146 | PmU.fU.mU.mC.mC.mA.mG.mG.mU.mU.mU.mU.mC.fC.mA |
| | | .mU.mA.mU.mC.mU.mG.fG.fA.fA.mA.mA.mC.mC.mU.mG |
| | | .mG.mA.mA.mA |
| 1651 | 147 | PmU.fU.mC.mC.mA.mG.mG.mU.mU.mU.mU.mC.mC.fA.mU |
| | | .mA.mU.mC.mC.mA.mU.fG.fG.fA.m.A.mA.mA.mC.mC.m |
| | | U.mG.mG.mA.mA |
| 1652 | 148 | PmU.fC.mC.mA.mU.mG.mU.mU.mG.mU.mG.mC.mA.fA.mU |
| | | .mC.mC.mA.mU.mA.mU.fU.fG.fC.mA.mC.mA.mA.mC.mA |
| | | .mU.mG.mG.mA |
| 1653 | 149 | PmU.fC.mA.mU.mA.mU.mC.mC.mU.mU.mG.mA.mC.fU.mU |
| | | .mU.mG.mA.mA.mA.mA.fG.fU.fC.mA.mA.mG.mG.mA.mU |
| | | .mA.mU.mG.mA |
| 1654 | 150 | PmU.fU.mG.mA.mC.mU.mU.mU.mG.mA.mA.mC.mA.fC.mA |
| | | .mU.mG.mU.mU.mU.mG.fU.fG.fU.mU.mC.mA.mA.mA.mG |
| | | .mU.mC.mA.mA |
| 1655 | 151 | PmU.fC.mU.mC.mA.mU.mC.mU.mU.mG.mG.mA.mG.fU.mU |
| | | .mU.mC.mU.mC.mA.m.A.fC.fU.fC.mC.mA.mA.mG.mA.m |
| | | U.mG.mA.mG.mA |
| 1656 | 152 | PmU.fC.mA.mU.mG.mU.mU.mG.mC.mU.mC.mA.mU.fU.mG |
| | | .mU.mC.mU.mU.mC.mA.fA.fU.fG.mA.mG.mC.mA.mA.mC |
| | | .mA.mU.mG.mA |
| 1657 | 153 | PmU.fA.mC.mC.mA.mA.mC.mU.mU.mG.mA.mA.mU.fG.mA |
| | | .mA.mA.mC.mG.mU.mC.fA.fU.fU.mC.mA.mA.mG.mU.mU |
| | | .mG.mG.mU.mA |
| 1658 | 154 | PmU.fA.mC.mA.mG.mA.mU.mC.mG.mC.mU.mG.mU.fC.mU |
| | | .mG.mC.mC.mC.mA.mG.fA.fC.fA.mG.mC.mG.mA.mU.mC |
| | | .mU.mG.mU.mA |
| 1659 | 155 | PmU.fU.mC.mA.mC.mA.mG.mC.mU.mG.mC.mC.mU.fU.mU |
| | | .mC.mU.mU.mA.mA.mA.fA.fG.fG.mC.mA.mG.mC.mU.mG |
| | | .mU.mG.mA.mA |
| 1660 | 156 | PmU.fG.mG.mC.mC.mG.mC.mC.mA.mG.mA.mA.mU.fC.mA |
| | | .mC.mC.mU.mC.mU.mG.fA.fU.fU.mC.mU.mG.mG.mC.mG |
| | | .mG.mC.mC.mA |
| 1661 | 157 | PmU.fC.mC.mA.mA.mG.mC.mU.mG.mA.mA.mA.mC.fU.mC |
| | | .mC.mA.mG.mA.mG.mA.fG.fU.fU.mU.mC.mA.mG.mC.mU |
| | | .mU.mG.mG.mA |
| 1662 | 158 | PmU.fU.mU.mG.mA.mU.mC.mA.mG.mG.mG.mC.mA.fA.mC |
| | | .mG.mU.mC.mA.mG.mU.fU.fG.fC.mC.mC.mU.mG.mA.mU |
| | | .mC.mA.mA.mA |
| 1663 | 159 | PmU.fG.mU.mU.mC.mC.mC.mA.mA.mA.mC.mC.mA.fU.mG |
| | | .mC.mC.mA.mC.mC.mA.fU.fG.fG.mU.mU.mU.mG.mG.mG |
| | | .mA.mA.mC.mA |
| 1664 | 160 | PmU.fA.mC.mC.mU.mG.mC.mU.mU.mU.mU.mG.mC.fC.mG |
| | | .mC.mU.mU.mC.mC.mG.fG.fC.fA.mA.mA.mA.mG.mC.mA |
| | | .mG.mG.mU.mA |
| 1665 | 161 | PmU.fU.mU.mG.mC.mU.mC.mA.mU.mU.mG.mU.mC.fU.mU |
| | | .mU.mC.mU.mU.mA.mA.fG.fA.fC.mA.mA.mU.mG.mA.mG |
| | | .mC.mA.mA.mA |
| 1666 | 162 | PmU.fC.mA.mC.mG.mU.mU.mC.mG.mC.mC.mG.mC.fU.mG |
| | | .mG.mG.mA.mG.mC.mA.fG.fC.fG.mG.mC.mG.mA.mA.mC |
| | | .mG.mU.mG.mA |
| 1667 | 163 | PmU.fC.mA.mU.mU.mC.mU.mU.mG.mA.mU.mG.mU.fA.mG |
| | | .mA.mC.mC.mU.mC.mU.fA.fC.fA.mU.mC.mA.mA.mG.mA |
| | | .mA.mU.mG.mA |
| 1668 | 164 | PmU.fU.mU.mG.mA.mG.mC.mU.mU.mG.mA.mU.mC.fA.mG |
| | | .mG.mG.mC.mA.mC.mU.fG.fA.fU.mC.mA.mA.mG.mC.mU |
| | | .mC.mA.mA.mA |
| 1669 | 165 | PmU.fA.mU.mU.mC.mU.mU.mG.mA.mU.mG.mU.mA.fG.mA |
| | | .mC.mC.mU.mC.mU.mC.fU.fA.fC.mA.mU.mC.mA.mA.mG |
| | | .mA.mA.mU.mA |
| 1670 | 166 | PmU.fU.mG.mA.mA.mG.mG.mA.mG.mU.mC.mU.mU.fG.mG |
| | | .mC.mA.mG.mG.mC.mC.fA.fA.fG.mA.mC.mU.mC.mC.mU |
| | | .mU.mC.mA.mA |
| 1671 | 167 | PmU.fU.mU.mG.mG.mC.mU.mU.mC.mA.mC.mA.mC.fC.mA |
| | | .mU.mA.mA.mC.mU.mG.fG.fU.fG.mU.mG.mA.mA.mG.mC |
| | | .mC.mA.mA.mA |
| 1672 | 168 | PmU.fA.mU.mC.mU.mU.mG.mG.mC.mU.mU.mC.mA.fC.mA |
| | | .mC.mC.mA.mU.mU.mG.fU.fG.fA.mA.mG.mC.mC.mA.mA |
| | | .mG.mA.mU.mA |
| 1673 | 169 | PmU.fC.mU.mC.mA.mC.mA.mG.mC.mU.mG.mC.mC.fU.mU |
| | | .mU.mC.mU.mU.mA.mA.fG.fG.fC.mA.mG.mC.mU.mG.mU |
| | | .mG.mA.mG.mA |
| 1674 | 170 | PmU.fC.mC.mA.mA.mU.mG.mC.mU.mG.mU.mC.mU.fG.mA |
| | | .mU.mC.mC.mA.mU.mC.fA.fG.fA.mC.mA.mG.mC.mA.mU |
| | | .mU.mG.mG.mA |
| 1675 | 171 | PmU.fG.mA.mG.mU.mG.mG.mU.mG.mG.mU.mC.mA.fC.mA |
| | | .mC.mC.mU.mC.mU.mG.fU.fG.fA.mC.mC.mA.mC.mC.mA |
| | | .mC.mU.mC.mA |
| 1676 | 172 | PmU.fA.mU.mA.mG.mG.mG.mA.mC.mU.mC.mA.mC.fU.mC |
| | | .mC.mU.mC.mC.mG.mA.fG.fU.fG.mA.mG.mU.mC.mC.mC |
| | | .mU.mA.mU.mA |
| 1677 | 173 | PmU.fC.mU.mG.mA.mC.mU.mU.mC.mA.mA.mC.mU.fU.mG |
| | | .mU.mG.mG.mU.mC.mA.fA.fG.fU.mU.mG.mA.mA.mG.mU |
| | | .mC.mA.mG.mA |
| 1678 | 174 | PmU.fU.mU.mC.mU.mC.mA.mA.mU.mU.mA.mA.mG.fU.mU |
| | | .mG.mA.mC.mU.mA.mA.fC.fU.fU.mA.mA.mU.mU.mG.mA |
| | | .mG.mA.mA.mA |
| 1679 | 175 | PmU.fA.mG.mU.mU.mU.mC.mU.mC.mC.mU.mU.mC.fA.mG |
| | | .mC.mC.mA.mG.mC.mU.fG.fA.fA.mG.mG.mA.mG.mA.mA |
| | | .mA.mC.mU.mA |
| 1680 | 176 | PmU.fA.mG.mC.mU.mU.mU.mG.mA.mU.mA.mU.mC.fC.mU |
| | | .mG.mU.mG.mC.mA.mG.fG.fA.fU.mA.mU.mC.mA.mA.mA |
| | | .mG.mC.mU.mA |
| 1681 | 177 | PmU.fU.mG.mU.mC.mC.mU.mU.mG.mA.mC.mU.mU.fU.mG |
| | | .mU.mC.mA.mU.mC.mA.fA.fA.fG.mU.mC.mA.mA.mG.mG |
| | | .mA.mC.mA.mA |
| 1682 | 178 | PmU.fC.mA.mG.mG.mU.mA.mC.mG.mU.mG.mU.mC.fU.mG |
| | | .mC.mA.mC.mA.mC.mA.fG.fA.fC.mA.mC.mG.mU.mA.mC |
| | | .mC.mU.mG.mA |
| 1683 | 179 | PmU.f.A.mA.mA.mC.mA.mA.mU.mG.mU.mG.mC.mU.fG.m |
| | | C.mU.mG.mU.mC.mG.mC.fA.fG.fC.mA.mC.mA.mU.mU.m |
| | | G.mU.mU.mU.mA |
| 1684 | 180 | PmU.fA.mU.mA.mU.mC.mC.mU.mG.mU.mG.mC.mA.fG.mG |
| | | .mG.mA.mG.mC.mC.mC.fU.fG.fC.mA.mC.mA.mG.mG.mA |
| | | .mU.mA.mU.mA |
| 1685 | 181 | PmU.fG.mA.mC.mU.mC.mA.mG.mA.mG.mA.mC.mU.fG.mG |
| | | .mC.mU.mU.mU.mC.mC.fA.fG.fU.mC.mU.mC.mU.mG.mA |
| | | .mG.mU.mC.mA |
| 1686 | 182 | PmU.fC.mA.mA.mU.mG.mA.mC.mA.mG.mU.mA.mA.fU.mU |
| | | .mG.mG.mG.mU.mA.mA.fU.fU.fA.mC.mU.mG.mU.mC.mA |
| | | .mU.mU.mG.mA |
| 1687 | 183 | PmU.fG.mA.mG.mC.mC.mA.mC.mC.mU.mU.mC.mC.fU.mG |
| | | .mA.mC.mA.mC.mC.mA.fG.fG.fA.mA.mG.mG.mU.mG.mG |
| | | .mC.mU.mC.mA |
| 1688 | 184 | PmU.fC.mU.mU.mG.mA.mC.mU.mU.mU.mG.mA.mA.fC.mA |
| | | .mC.mA.mU.mG.mU.mG.fU.fU.fC.mA.mA.mA.mG.mU.mC |
| | | .mA.mA.mG.mA |
| 1689 | 185 | PmU.fA.mU.mG.mA.m.A.mA.mC.mG.mA.mC.mU.mU.fC.m |
| | | U.mC.mU.mU.mG.mA.mG.fA.fA.fG.mU.mC.mG.mU.mU.m |
| | | U.mC.mA.mU.mA |
| 1690 | 186 | PmU.fG.mA.mA.mG.mA.mC.mA.mG.mG.mA.mA.mA.fG.mC |
| | | .mU.mU.mC.mG.mG.mC.fU.fU.fU.mC.mC.mU.mG.mU.mC |
| | | .mU.mU.mC.mA |
| 1691 | 187 | PmU.fG.mC.mU.mU.mU.mG.mA.mU.mA.mU.mC.mC.fU.mG |
| | | .mU.mG.mC.mA.mC.mA.fG.fG.fA.mU.mA.mU.mC.mA.mA |
| | | .mA.mG.mC.mA |
| 1692 | 188 | PmU.fU.mC.mU.mU.mG.mA.mG.mC.mU.mU.mG.mA.fU.mC |
| | | .mA.mG.mG.mG.mG.mA.fU.fC.fA.mA.mG.mC.mU.mC.mA |
| | | .mA.mG.mA.mA |
| 1693 | 189 | PmU.fG.mG.mA.mU.mU.mG.mC.mU.mC.mU.mG.mC.fA.mC |
| | | .mU.mC.mU.mG.mG.mU.fG.fC.fA.mG.mA.mG.mC.mA.mA |
| | | .mU.mC.mC.mA |
| 1694 | 190 | PmU.fC.mA.mU.mA.mU.mU.mG.mA.mG.mC.mA.mU.fC.mU |
| | | .mC.mU.mC.mU.mA.mG.fA.fU.fG.mC.mU.mC.mA.mA.mU |
| | | .mA.mU.mG.mA |
| 1695 | 191 | PmU.fA.mU.mC.mC.mU.mU.mG.mA.mC.mU.mU.mU.fG.mA |
| | | .mA.mC.mA.mC.mU.mC.fA.fA.fA.mG.mU.mC.mA.mA.mG |
| | | .mG.mA.mU.mA |
| 1696 | 192 | PmU.fG.mC.mA.mG.mA.mC.mA.mU.mC.mC.mA.mC.fU.mA |
| | | .mC.mU.mC.mC.mU.mA.fG.fU.fG.mG.mA.mU.mG.mU.mC |
| | | .mU.mG.mC.mA |
| 1697 | 193 | PmU.fA.mG.mA.mC.mC.mU.mC.mC.mU.mU.mC.mC.fG.mA |
| | | .mG.mU.mC.mA.mU.mC.fG.fG.fA.mA.mG.mG.mA.mG.mG |
| | | .mU.mC.mU.mA |
| 1698 | 194 | PmU.fA.mC.mC.mU.mU.mC.mU.mC.mA.mA.mU.mU.fA.mA |
| | | .mG.mU.mU.mG.mU.mU.fA.fA.fU.mU.mG.mA.mG.mA.mA |
| | | .mG.mG.mU.mA |
| 1699 | 195 | PmU.fA.mG.mA.mA.mG.mU.mC.mG.mG.mA.mA.mG.fG.mA |
| | | .mG.mC.mC.mG.mU.mC.fC.fU.fU.mC.mC.mG.mA.mC.mU |
| | | .mU.mC.mU.mA |
| 1700 | 196 | PmU.fU.mG.mC.mA.mC.mA.mG.mG.mG.mU.mA.mC.fG.mG |
| | | .mG.mU.mA.mG.mC.mC.fG.fU.fA.mC.mC.mC.mU.mG.mU |
| | | .mG.mC.mA.mA |
| 1701 | 197 | PmU.fA.mU.mG.mA.mC.mA.mG.mU.m.A.mA.mU.mU.fG.m |
| | | G.mG.mU.mC.mC.mC.mC.fA.fA.fU.mU.mA.mC.mU.mG.m |
| | | U.mC.mA.mU.mA |
| 1702 | 198 | PmU.fG.mU.mU.mA.mG.mU.mC.mC.mC.mU.mG.mA.fC.mU |
| | | .mU.mC.mA.mA.mA.mG.fU.fC.fA.mG.mG.mG.mA.mC.mU |
| | | .mA.mA.mC.mA |
| 1703 | 199 | PmU.fA.mU.mA.mU.mC.mC.mU.mU.mG.mA.mC.mU.fU.mU |
| | | .mG.mA.mA.mC.mA.mA.fA.fG.fU.mC.mA.mA.mG.mG.mA |
| | | .mU.mA.mU.mA |
| 1704 | 200 | PmU.fG.mU.mA.mC.mG.mU.mG.mU.mC.mU.mG.mC.fA.mC |
| | | .mA.mG.mG.mG.mG.mU.fG.fC.fA.mG.mA.mC.mA.mC.mG |
| | | .mU.mA.mC.mA |
| 1705 | 201 | PmU.fG.mU.mC.mA.mG.mC.mA.mC.mA.mA.mA.mG.fU.mA |
| | | .mC.mU.mC.mA.mU.mA.fC.fU.fU.mU.mG.mU.mG.mC.mU |
| | | .mG.mA.mC.mA |
| 1706 | 202 | PmU.fU.mG.mG.mU.mC.mU.mU.mC.mA.mU.mA.mA.fU.mU |
| | | .mG.mA.mU.mU.mA.mA.fU.fU.fA.mU.mG.mA.mA.mG.mA |
| | | .mC.mC.mA.mA |
| 1707 | 203 | PmU.fC.mA.mG.mA.mG.mA.mC.mU.mC.mA.mG.mA.fG.mA |
| | | .mC.mU.mG.mG.mU.mC.fU.fC.fU.mG.mA.mG.mU.mC.mU |
| | | .mC.mU.mG.mA |
| 1708 | 204 | PmU.fU.mA.mG.mA.mC.mA.mU.mC.mC.mA.mG.mA.fU.mA |
| | | .mA.mU.mC.mC.mU.mA.fU.fC.fU.mG.mG.mA.mU.mG.mU |
| | | .mC.mU.mA.mA |
| 1709 | 205 | PmU.fC.mU.mC.mC.mU.mU.mC.mC.mG.mA.mG.mU.fC.mA |
| | | .mG.mC.mU.mU.mU.mG.fA.fC.fU.mC.mG.mG.mA.mA.mG |
| | | .mG.mA.mG.mA |
| 1710 | 206 | PmU.fC.mA.mU.mG.mG.mA.mG.mC.mC.mU.mG.mA.fA.mG |
| | | .mG.mG.mU.mC.mC.mU.fU.fC.fA.mG.mG.mC.mU.mC.mC |
| | | .mA.mU.mG.mA |
| 1711 | 207 | PmU.fU.mG.mG.mC.mA.mU.mA.mU.mG.mU.mC.mA.fC.mU |
| | | .mA.mG.mA.mC.mA.mG.fU.fG.fA.mC.mA.mU.mA.mU.mG |
| | | .mC.mC.mA.mA |
| 1712 | 208 | PmU.fA.mA.mG.mC.mA.mU.mU.mG.mA.mU.mG.mU.fU.mC |
| | | .mA.mC.mU.mU.mG.mA.fA.fC.fA.mU.mC.mA.mA.mU.mG |
| | | .mC.mU.mU.mA |
| 1713 | 209 | PmU.fC.mU.mC.mA.mC.mU.mC.mC.mU.mC.mC.mA.fG.mU |
| | | .mA.mC.mA.mA.mA.mC.fU.fG.fG.mA.mG.mG.mA.mG.mU |
| | | .mG.mA.mG.mA |
| 1714 | 210 | PmU.fG.mA.mU.mG.mU.mC.mC.mU.mU.mG.mA.mC.fU.mU |
| | | .mU.mG.mU.mC.mA.mA.fG.fU.fC.mA.mA.mG.mG.mA.mC |
| | | .mA.mU.mC.mA |
| 1715 | 211 | PmU.fU.mG.mU.mU.mU.mU.mA.mA.mU.mU.mC.mA.fA.mU |
| | | .mC.mC.mC.mA.mA.mU.fU.fG.fA.mA.mU.mU.mA.mA.mA |
| | | .mA.mC.mA.mA |
| 1716 | 212 | PmU.fU.mA.mG.mA.mU.mG.mU.mU.mC.mA.mU.mG.fG.mA |
| | | .mG.mC.mC.mU.mU.mC.fC.fA.fU.mG.mA.mA.mC.mA.mU |
| | | .mC.mU.mA.mA |
| 1717 | 213 | PmU.fA.mU.mA.mG.mC.mA.mG.mU.mG.mG.mA.mA.fA.mG |
| | | .mA.mG.mA.mU.mC.mU.fU.fU.fC.mC.mA.mC.mU.mG.mC |
| | | .mU.mA.mU.mA |
| 1718 | 214 | PmU.fC.mA.mU.mU.mC.mA.mC.mU.mU.mG.mG.mC.fA.mG |
| | | .mG.mU.mG.mC.mC.mU.fG.fC.fC.mA.mA.mG.mU.mG.mA |
| | | .mA.mU.mG.mA |
| 1719 | 215 | PmU.fA.mU.mU.mG.mA.mU.mG.mU.mU.mC.mA.mC.fU.mU |
| | | .mG.mG.mU.mU.mA.mA.fG.fU.fG.mA.mA.mC.mA.mU.mC |
| | | .mA.mA.mU.mA |
| 1720 | 216 | PmU.fC.mA.mG.mC.mC.mA.mG.mG.mG.mC.mA.mG.fC.mA |
| | | .mC.mU.mU.mG.mU.mG.fC.fU.fG.mC.mC.mC.mU.mG.mG |
| | | .mC.mU.mG.mA |
| 1721 | 217 | PmU.fC.mU.mC.mA.mG.mU.mG.mU.mC.mC.mA.mA.fG.mC |
| | | .mU.mG.mA.mA.mG.mC.fU.fU.fG.mG.mA.mC.mA.mC.mU |
| | | .mG.mA.mG.mA |
| 1722 | 218 | PmU.fC.mA.mG.mA.mG.mA.mC.mU.mG.mG.mC.mU.fU.mU |
| | | .mC.mA.mU.mC.mA.mA.fA.fG.fC.mC.mA.mG.mU.mC.mU |
| | | .mC.mU.mG.mA |
| 1723 | 219 | PmU.fA.mU.mC.mC.mA.mG.mA.mU.mA.mA.mU.mC.fC.mU |
| | | .mC.mC.mC.mU.mA.mG.fG.fA.fU.mU.mA.mU.mC.mU.mG |
| | | .mG.mA.mU.mA |
| 1724 | 220 | PmU.fC.mU.mU.mC.mU.mC.mA.mA.mU.mU.mA.mA.fG.mU |
| | | .mU.mG.mA.mC.mA.mC.fU.fU.fA.mA.mU.mU.mG.mA.mG |
| | | .mA.mA.mG.mA |
| 1725 | 221 | PmU.fC.mC.mA.mG.mA.mC.mC.mU.mA.mG.mA.mC.fC.mU |
| | | .mG.mG.mU.mC.mA.mG.fG.fU.fC.mU.mA.mG.mG.mU.mC |
| | | .mU.mG.mG.mA |
| 1726 | 222 | PmU.fC.mA.mA.mC.mG.mU.mC.mA.mU.mA.mG.mU.fC.mA |
| | | .mU.mA.mA.mA.mU.mG.fA.fC.fU.mA.mU.mG.mA.mC.mG |
| | | .mU.mU.mG.mA |
| 1727 | 223 | PmU.fU.mU.mG.mA.mA.mU.mG.mA.mA.mA.mC.mG.fA.mC |
| | | .mU.mU.mC.mU.mG.mU.fC.fG.fU.mU.mU.mC.mA.mU.mU |
| | | .mC.mA.mA.mA |
| 1728 | 224 | PmU.fC.mC.mU.mC.mC.mU.mC.mA.mG.mA.mC.mA.fC.mA |
| | | .mA.mA.mC.mA.mU.mG.fU.fG.fU.mC.mU.mG.mA.mG.mG |
| | | .mA.mG.mG.mA |
| 1729 | 225 | PmU.fA.mA.mG.mC.mC.mA.mA.mA.mG.mC.mA.mU.fU.mG |
| | | .mA.mU.mG.mU.mC.mA.fA.fU.fG.mC.mU.mU.mU.mG.mG |
| | | .mC.mU.mU.mA |
| 1730 | 226 | PmU.fU.mG.mA.mA.mA.mC.mG.mA.mC.mU.mU.mC.fU.mC |
| | | .mU.mU.mG.mU.mG.mA.fG.fA.fA.mG.mU.mC.mG.mU.mU |
| | | .mU.mC.mA.mA |
| 1731 | 227 | PmU.fA.m.A.mC.mU.mU.mG.mU.mG.mG.mU.mC.mU.fU.m |
| | | C.mA.mU.mA.mA.mG.mA.fA.fG.fA.mC.mC.mA.mC.mA.m |
| | | A.mG.mU.mU.mA |
| 1732 | 228 | PmU.fC.mC.mA.mG.mG.mU.mA.mG.mA.mU.mG.mU.fU.mC |
| | | .mA.mU.mG.mG.mG.mA.fA.fC.fA.mU.mC.mU.mA.mC.mC |
| | | .mU.mG.mG.mA |
| 1733 | 229 | PmU.fC.mU.mG.mU.mG.mU.mU.mC.mU.mG.mG.mC.fA.mC |
| | | .mC.mU.mG.mC.mG.mU.fG.fC.fC.mA.mG.mA.mA.mC.mA |
| | | .mC.mA.mG.mA |
| 1734 | 230 | PmU.fA.mA.mC.mU.mU.mG.mC.mC.mA.mC.mC.mU.fU.mC |
| | | .mU.mC.mA.mA.mG.mA.fA.fG.fG.mU.mG.mG.mC.mA.mA |
| | | .mG.mU.mU.mA |
| 1735 | 231 | PmU.fG.mC.mC.mA.mU.mG.mG.mU.mU.mG.mC.mU.fU.mG |
| | | .mU.mG.mG.mU.mC.mA.fA.fG.fC.mA.mA.mC.mC.mA.mU |
| | | .mG.mG.mC.mA |
| 1736 | 232 | PmU.fG.mA.mC.mA.mA.mA.mU.mG.mG.mG.mC.mC.fU.mG |
| | | .mA.mU.mA.mG.mC.mA.fG.fG.fC.mC.mC.mA.mU.mU.mU |
| | | .mG.mU.mC.mA |
| 1737 | 233 | PmU.fA.mA.mG.mU.mU.mG.mA.mC.mU.mA.mG.mA.fC.mA |
| | | .mC.mU.mU.mU.mU.mG.fU.fC.fU.mA.mG.mU.mC.mA.mA |
| | | .mC.mU.mU.mA |
| 1738 | 234 | PmU.fC.mA.mU.mG.mG.mC.mG.mG.mG.mU.mG.mC.fG.mG |
| | | .mU.mU.mC.mC.mC.mC.fG.fC.fA.mC.mC.mC.mG.mC.mC |
| | | .mA.mU.mG.mA |
| 1739 | 235 | PmU.fC.mC.mG.mG.mA.mU.mC.mU.mC.mA.mU.mC.fA.mA |
| | | .mU.mG.mA.mC.mU.mU.fG.fA.fU.mG.mA.mG.mA.mU.mC |
| | | .mC.mG.mG.mA |
| 1740 | 236 | PmU.fG.mA.mG.mG.mA.mA.mG.mC.mC.mU.mC.mA.fA.mA |
| | | .mG.mC.mU.mC.mU.mU.fU.fG.fA.mG.mG.mC.mU.mU.mC |
| | | .mC.mU.mC.mA |
| 1741 | 237 | PmU.fA.mC.mU.mU.mU.mG.mA.mA.mC.mA.mC.mA.fU.mG |
| | | .mU.mU.mG.mC.mC.mA.fU.fG.fU.mG.mU.mU.mC.mA.mA |
| | | .mA.mG.mU.mA |
| 1742 | 238 | PmU.fC.mU.mC.mC.mU.mC.mC.mU.mC.mA.mG.mA.fC.mA |
| | | .mC.mA.mA.mA.mU.mG.fU.fC.fU.mG.mA.mG.mG.mA.mG |
| | | .mG.mA.mG.mA |
| 1743 | 239 | PmU.fA.mG.mG.mA.mA.mG.mG.mC.mU.mC.mC.mG.fU.mC |
| | | .mC.mC.mG.mC.mG.mA.fC.fG.fG.mA.mG.mC.mC.mU.mU |
| | | .mC.mC.mU.mA |
| 1744 | 240 | PmU.fC.mG.mC.mC.mA.mG.mA.mA.mU.mC.mA.mC.fC.mU |
| | | .mC.mU.mG.mC.mA.mG.fG.fU.fG.mA.mU.mU.mC.mU.mG |
| | | .mG.mC.mG.mA |
| 1745 | 241 | PmU.fG.mG.mA.mA.mA.mG.mA.mG.mA.mU.mC.mU.fC.mA |
| | | .mU.mC.mA.mC.mU.mG.fA.fG.fA.mU.mC.mU.mC.mU.mU |
| | | .mU.mC.mC.mA |
| 1746 | 242 | PmU.fA.mA.mG.mU.mC.mC.mC.mG.mG.mA.mU.mC.fU.mC |
| | | .mA.mU.mC.mA.mG.mA.fG.fA.fU.mC.mC.mG.mG.mG.mA |
| | | .mC.mU.mU.mA |
| 1747 | 243 | PmU.fG.mA.mG.mC.mU.mU.mG.mA.mU.mC.mA.mG.fG.mG |
| | | .mC.mA.mA.mC.mC.mC.fC.fU.fG.mA.mU.mC.mA.mA.mG |
| | | .mC.mU.mC.mA |
| 1748 | 244 | PmU.fG.mU.mU.mG.mC.mU.mC.mA.mU.mU.mG.mU.fC.mU |
| | | .mU.mU.mC.mU.mA.mG.fA.fC.fA.mA.mU.mG.mA.mG.mC |
| | | .mA.mA.mC.mA |
| 1749 | 245 | PmU.fU.mG.mC.mU.mU.mG.mU.mG.mG.mU.mA.mA.fU.mC |
| | | .mG.mG.mU.mA.mG.mA.fU.fU.fA.mC.mC.mA.mC.mA.mA |
| | | .mG.mC.mA.mA |
| 1750 | 246 | PmU.fU.mC.mA.mU.mC.mA.mC.mU.mC.mA.mC.mA.fU.mU |
| | | .mG.mU.mA.mG.mA.mA.fU.fG.fU.mG.mA.mG.mU.mG.mA |
| | | .mU.mG.mA.mA |
| 1751 | 247 | PmU.fC.mA.mG.mU.mG.mU.mC.mC.mA.mA.mG.mC.fU.mG |
| | | .mA.mA.mA.mC.mC.mA.fG.fC.fU.mU.mG.mG.mA.mC.mA |
| | | .mC.mU.mG.mA |
| 1752 | 248 | PmU.fC.mC.mA.mU.mU.mC.mU.mU.mG.mA.mU.mG.fU.mA |
| | | .mG.mA.mC.mC.mU.mA.fC.fA.fU.mC.mA.mA.mG.mA.mA |
| | | .mU.mG.mG.mA |
| 1753 | 249 | PmU.fA.m.A.mC.mA.mA.mU.mG.mU.mG.mC.mU.mG.fC.m |
| | | U.mG.mU.mC.mA.mA.mG.fC.fA.fG.mC.mA.mC.mA.mU.m |
| | | U.mG.mU.mU.mA |
| 1754 | 250 | PmU.fG.mA.mC.mU.mU.mC.mA.mA.mC.mU.mU.mG.fU.mG |
| | | .mG.mU.mC.mU.mC.mA.fC.fA.fA.mG.mU.mU.mG.mA.mA |
| | | .mG.mU.mC.mA |
| 1755 | 106-13(4) | mU.fU.mG.fA.mA.fU.mG.fA.mA.fA.mC.fG.mA.fC.mU. |
| | as + s | fU.mC.fU.mC.fG.mU.fU.mU.fC.mA.fU.mU.fC.mA.fA. |
| | | 3xGalNAc |
| 1756 | 13(5) | mU.fU.mG.mC.mC.mA.mC.mA.mG.mA.mG.mA.mC.fU.mC. |
| | as +s | mA.mG.mA.mG.mA.fG.fU.fC.mU.mC.mU.mG.mU.mG.mG. |
| | | mC.mA.mA.3xGaINAc |

[0318] The first nucleobase on the terminal 5′ position (the sequences in the table are presented from a 5′(Ieft) to a 3′(right direction) can be freely selected from U, A, G and C instead of the nucleobase disclosed in the table.

[0319] Note=each of the above constructs may or may not have a phosphate modification at the 5′ end group. Furthermore, and independently, each of the above constructs may or may not have a “3× GalNAc” coupled to the 3′ end group. Advantageously the constructs contain a 3× GalNAc ligand, in particular a toothbrush ligand as defined herein. Particularly advantageous are constructs, which in addition have a 5′ phosphate, even though this is not a strict requirement, given that in the absence thereof, mammalian cells will add such phosphate in case it is absent from the molecule as administered.

TABLE 3b
Modified CFB hairpin constructs including
internucleoside linkages

| SEQ | Construct | Modified CFB hairpin |
|---|---|---|
| ID No. | ID NO. | constructs |
| 1757 | 13(5) | 5′-usUfsgccacagagacUfscs |
| | as + s | asgsasgsaGfUfCfucuguggcs |
| | | asas(SO-GalNAc)(SO-GalNAc) |
| | | (SO-GalNAc)-3′ |
| 1758 | 106-13(4) | 5′-usUfsgAfaUfgAfaAfcGfa |
| | as + s | sCfsusUfscsUfscGfuUfuCfa |
| | | UfuCfsasAfs(SO-GalNAc)(SO- |
| | | GalNAc)(SO-GalNAc)-3′ |

[0320] The first nucleobase on the terminal 5′ position (the sequences in the table are presented from a 5′(left) to a 3′(right direction) can be freely selected from U, A, G and C instead of the nucleobase disclosed in the table.

TABLE 3c

| SEQ ID | Construct | Antisense | |
|---|---|---|---|
| No. | ID NO. | ID | Modified 19mer C5 Antisense constructs |
| 1759 | 251 | 24151 | [5Phos][mU][Ps][fC][Ps][mA][fC][mA][fG][mU][fU][mU][fG][mG] |
| | | | [fC][mC][fU][Ps][mG][Ps][fG][Ps][mA][Ps][fG][Ps][mA] |
| 1760 | 252 | 24152 | [5Phos][mU][Ps][fG][Ps][mA][fA][mU][fC][mU][fU][mG][fA][mA] |
| | | | [fG][mU][fC][Ps][mA][Ps][fG][Ps][mG][Ps][fA][Ps][mA] |
| 1761 | 253 | 24153 | [5Phos][mU][Ps][fU][Ps][mG][fG][mG][fC][mU][fU][mG][fU][mA] |
| | | | [fG][mC][fU][Ps][mG][Ps][fG][Ps][mC][Ps][fA][Ps][mC] |
| 1762 | 254 | 24154 | [5Phos][mU][Ps][fC][Ps][mA][fA][mG][fU][mA][fA][mU][fU][mA] |
| | | | [fU][mA][fG][Ps][mU][Ps][fG][Ps][mA][Ps][fG][Ps][mU] |
| 1763 | 255 | 24155 | [5Phos][mU][Ps][fA][Ps][mA][fC][mA][fG][mG][fU][mU][fU][mG] |
| | | | [fU][mC][fU][Ps][mG][Ps][fU][Ps][mA][Ps][fU][Ps][mG] |
| 1764 | 256 | 24156 | [5Phos][mU][Ps][fC][Ps][mA][fG][mA][fC][mA][fU][mU][fU][mU] |
| | | | [fA][mA][fC][Ps][mA][Ps][fC][Ps][mA][Ps][fG][Ps][mA] |
| 1765 | 257 | 24157 | [5Phos][mU][Ps][fC][Ps][mC][fU][mG][fG][mA][fG][mC][fU][mG] |
| | | | [fG][mU][fU][Ps][mG][Ps][fC][Ps][mC][Ps][fA][Ps][mC] |
| 1766 | 258 | 24158 | [5Phos][mU][Ps][fA][Ps][mU][fA][mA][fA][mA][fU][mC][fA][mA] |
| | | | [fG][mU][fA][Ps][mA][Ps][fU][Ps][mU][Ps][fA][Ps][mU] |
| 1767 | 259 | 24159 | [5Phos][mU][Ps][fA][Ps][mC][fA][mC][fA][mG][fU][mU][fU][mG] |
| | | | [fG][mC][fC][Ps][mU][Ps][fG][Ps][mG][Ps][fA][Ps][mG] |
| 1768 | 260 | 24160 | [5Phos][mU][Ps][fG][Ps][mG][fA][mA][fU][mC][fU][mU][fG][mA] |
| | | | [fA][mG][fU][Ps][mC][Ps][fA][Ps][mG][Ps][fG][Ps][mA] |
| 1769 | 261 | 24161 | [5Phos][mU][Ps][fG][Ps][mA][fC][mA][fU][mU][fU][mU][fA][mA] |
| | | | [fC][mA][f C][Ps][mA][Ps][fG][Ps][mA][Ps][fA][Ps][mC] |
| 1770 | 262 | 24162 | [5Phos][mU][Ps][fG][Ps][mA][fA][mG][fU][mC][fA][mG][fG][mA] |
| | | | [fA][mA][fA][Ps][mG][Ps][fA][Ps][mG][Ps][fA][Ps][mU] |
| 1771 | 263 | 24163 | [5Phos][mU][Ps][fA][Ps][mC][fA][mG][fU][mU][fU][mG][fG][mC] |
| | | | [fC][mU][fG][Ps][mG][Ps][fA][Ps][mG][Ps][fA][Ps][mA] |
| 1772 | 264 | 24164 | [5Phos][mU][Ps][fA][Ps][mU][fU][mA][fU][mA][fG][mU][fG][mA] |
| | | | [fG][mU][fU][Ps][mA][Ps][fU][Ps][mU][Ps][fU][Ps][mU] |
| 1773 | 265 | 24165 | [5Phos][mU][Ps][fC][Ps][mC][fA][mA][fG][mU][fC][mA][fG][mA] |
| | | | [fU][mG][fU][Ps][mC][Ps][fU][Ps][mC][Ps][fU][Ps][mU] |
| 1774 | 266 | 24166 | [5Phos][mU][Ps][fC][Ps][mA][fG][mG][fA][mA][fA][mA][fG][mA] |
| | | | [fG][mA][fU][Ps][mA][Ps][fA][Ps][mU][Ps][fU][Ps][mC] |
| 1775 | 267 | 24167 | [5Phos][mU][Ps][fG][Ps][mC][fA][mA][fG][mA][fC][mA][fU][mA] |
| | | | [fU][mU][fC][Ps][mU][Ps][fU][Ps][mU][Ps][fA][Ps][mA] |
| 1776 | 268 | 24168 | [5Phos][mU][Ps][fA][Ps][mA][fG][mG][fC][mC][fA][mA][fU][mU] |
| | | | [fU][mC][fC][Ps][mA][Ps][fG][Ps][mA][Ps][fG][Ps][mG] |
| 1777 | 269 | 24169 | [5Phos][mU][Ps][fA][Ps][mA][fG][mU][fA][mA][fU][mU][fA][mU] |
| | | | [fA][mG][fU][Ps][mG][Ps][fA][Ps][mG][Ps][fU][Ps][mU] |
| 1778 | 270 | 24170 | [5Phos][mU][Ps][fU][Ps][mA][fA][mA][fA][mU][fC][mA][fA][mG] |
| | | | [fU][mA][fA][Ps][mU][Ps][fU][Ps][mA][Ps][fU][Ps][mA] |
| 1779 | 271 | 24171 | [5Phos][mU][Ps][fU][Ps][mC][fA][mA][fG][mU][fA][mA][fU][mU] |
| | | | [fA][mU][fA][Ps][mG][Ps][fU][Ps][mG][Ps][fA][Ps][mG] |
| 1780 | 272 | 24172 | [5Phos][mU][Ps][fC][Ps][mC][fA][mA][fU][mU][fU][mC][fC][mA] |
| | | | [fG][mA][fG][Ps][mG][Ps][fA][Ps][mA][Ps][fG][Ps][mC] |
| 1781 | 273 | 24173 | [5Phos][mU][Ps][fG][Ps][mU][fA][mA][fU][mU][fA][mU][fA][mG] |
| | | | [fU][mG][fA][Ps][mG][Ps][fU][Ps][mU][Ps][fA][Ps][mU] |
| 1782 | 274 | 24174 | [5Phos][mU][Ps][fA][Ps][mA][fA][mG][fG][mU][fA][mC][fU][mU] |
| | | | [fG][mU][fU][Ps][mG][Ps][fU][Ps][mU][Ps][fU][Ps][mA] |
| 1783 | 275 | 24175 | [5Phos][mU][Ps][fA][Ps][mC][fU][mG][fC][mU][fG][mU][fU][mU] |
| | | | [fC][mA][fG][Ps][mA][Ps][fA][Ps][mU][Ps][fC][Ps][mA] |
| 1784 | 276 | 24176 | [5Phos][mU][Ps][fC][Ps][mU][fG][mC][fU][mG][fU][mU][fU][mC] |
| | | | [fA][mG][fA][Ps][mA][Ps][fU][Ps][mC][Ps][fA][Ps][mA] |
| 1785 | 277 | 24177 | [5Phos][mU][Ps][fU][Ps][mA][fU][mA][fA][mA][fG][mG][fU][mA] |
| | | | [fC][mU][fU][Ps][mG][Ps][fU][Ps][mU][Ps][fG][Ps][mU] |
| 1786 | 278 | 24178 | [5Phos][mU][Ps][fG][Ps][mU][fA][mA][fA][mC][fA][mG][fU][mU] |
| | | | [fC][mC][fU][Ps][mU][Ps][fU][Ps][mC][Ps][fA][Ps][mA] |
| 1787 | 279 | 24179 | [5Phos][mU][Ps][fG][Ps][mU][fA][mA][fC][mU][fU][mU][fG][mG] |
| | | | [fC][mU][fG][Ps][mA][Ps][fG][Ps][mA][Ps][fG][Ps][mA] |
| 1788 | 280 | 24180 | [5Phos][mU][Ps][fA][Ps][mU][fA][mG][fU][mU][fG][mU][fA][mA] |
| | | | [fA][mC][fA][Ps][mG][Ps][fU][Ps][mU][Ps][fC][Ps][mC] |
| 1789 | 281 | 24181 | [5Phos][mU][Ps][fC][Ps][mA][fU][mA][fU][mU][fC][mU][fU][mU] |
| | | | [fA][mA][fC][Ps][mU][Ps][fU][Ps][mC][Ps][f A][Ps][mA] |
| 1790 | 282 | 24182 | [5Phos][mU][Ps][fA][Ps][mG][fC][mA][fG][mU][fC][mC][fU][mU] |
| | | | [fU][mU][fA][Ps][mC][Ps][fA][Ps][mC][Ps][fU][Ps][mC] |
| 1791 | 283 | 24183 | [5Phos][mU][Ps][fA][Ps][mG][fU][mG][fA][mG][fU][mU][fA][mU] |
| | | | [fU][mU][fU][Ps][mG][Ps][fU][Ps][mC][Ps][fA][Ps][mA] |
| 1792 | 284 | 24184 | [5Phos][mU][Ps][fG][Ps][mG][fA][mA][fG][mA][fC][mA][fU][mC] |
| | | | [fU][mU][fU][Ps][mG][Ps][fA][Ps][mA][Ps][fC][Ps][mA] |
| 1793 | 285 | 24185 | [5Phos][mU][Ps][fC][Ps][mA][fG][mU][fC][mC][fU][mU][fU][mU] |
| | | | [fA][mC][fA][Ps][mC][Ps][fU][Ps][mC][Ps][fA][Ps][mA] |
| 1794 | 286 | 24186 | [5Phos][mU][Ps][fG][Ps][mU][fU][mA][fU][mU][fU][mU][fG][mU] |
| | | | [fC][mA][fA][Ps][mU][Ps][fA][Ps][mU][Ps][fA][Ps][mU] |
| 1795 | 287 | 24187 | [5Phos][mU][Ps][fU][Ps][mA][fC][mA][fA][mC][fA][mG][fA][mA] |
| | | | [fU][mA][fU][Ps][mG][Ps][fG][Ps][mU][Ps][fA][Ps][mU] |
| 1796 | 288 | 24188 | [5Phos][mU][Ps][fU][Ps][mU][fA][mU][fU][mU][fU][mG][fU][mC] |
| | | | [fA][mA][fU][Ps][mA][Ps][fU][Ps][mA][Ps][fU][Ps][mG] |
| 1797 | 289 | 24189 | [5Phos][mU][Ps][fA][Ps][mG][fG][mC][fU][mU][fC][mA][fG][mG] |
| | | | [fA][mA][fA][Ps][mA][Ps][fG][Ps][mA][Ps][fG][Ps][mG] |
| 1798 | 290 | 24190 | [5Phos][mU][Ps][fG][Ps][mG][fA][mA][fA][mA][fG][mA][fG][mA] |
| | | | [fU][mA][fA][Ps][mU][Ps][fU][Ps][mC][Ps][fC][Ps][mA] |
| 1799 | 291 | 24191 | [5Phos][mU][Ps][fG][Ps][mU][fU][mA][fC][mA][fG][mC][fA][mA] |
| | | | [fU][mA][fU][Ps][mA][Ps][fA][Ps][mA][Ps][fG][Ps][mG] |
| 1800 | 292 | 24192 | [5Phos][mU][Ps][fA][Ps][mU][fA][mA][fG][mC][fA][mU][fA][mU] |
| | | | [fG][mC][fA][Ps][mA][Ps][fU][Ps][mC][Ps][fU][Ps][mC] |
| 1801 | 293 | 24193 | [5Phos][mU][Ps][fA][Ps][mU][fA][mU][fU][mC][fU][mU][fU][mA] |
| | | | [fA][mC][fU][Ps][mU][Ps][fC][Ps][mA][Ps][fA][Ps][mA] |
| 1802 | 294 | 24194 | [5Phos][mU][Ps][fA][Ps][mG][fA][mC][fA][mU][fC][mU][fU][mU] |
| | | | [fG][mA][fA][Ps][mC][Ps][fA][Ps][mC][Ps][fC][Ps][mU] |
| 1803 | 295 | 24195 | [5Phos][mU][Ps][fC][Ps][mA][fG][mG][fA][mA][fG][mA][fC][mA] |
| | | | [fU][mC][fU][Ps][mU][Ps][fU][Ps][mG][Ps][fA][Ps][mA] |
| 1804 | 296 | 24196 | [5Phos][mU][Ps][fA][Ps][mC][fA][mG][fC][mA][fA][mU][fA][mU] |
| | | | [fA][mA][fA][Ps][mG][Ps][fG][Ps][mU][Ps][fA][Ps][mC] |
| 1805 | 297 | 24197 | [5Phos][mU][Ps][fA][Ps][mU][fU][mG][fU][mC][fA][mU][fA][mG] |
| | | | [fG][mU][fU][Ps][mA][Ps][fU][Ps][mU][Ps][fG][Ps][mG] |
| 1806 | 298 | 24198 | [5Phos][mU][Ps][fG][Ps][mA][fG][mU][fU][mA][fU][mU][fU][mU] |
| | | | [fG][mU][fC][Ps][mA][Ps][fA][Ps][mU][Ps][fA][Ps][mU] |
| 1807 | 299 | 24199 | [5Phos][mU][Ps][fG][Ps][mU][fG][mA][fG][mU][fU][mA][fU][mU] |
| | | | [fU][mU][fG][Ps][mU][Ps][fC][Ps][mA][Ps][fA][Ps][mU] |
| 1808 | 300 | 24200 | [5Phos][mU][Ps][fU][Ps][mG][fA][mG][fU][mU][fA][mU][fU][mU] |
| | | | [fU][mG][fU][Ps][mC][Ps][fA][Ps][mA][Ps][fU][Ps][mA] |
| 1809 | 301 | 24201 | [5Phos][mU][Ps][fA][Ps][mA][fU][mU][fU][mU][fC][mC][fU][mU] |
| | | | [fG][mA][fA][Ps][mA][Ps][fG][Ps][mA][Ps][fU][Ps][mC] |
| 1810 | 302 | 24202 | [5Phos][mU][Ps][fC][Ps][mU][fG][mU][fU][mA][fC][mA][fG][mC] |
| | | | [fA][mA][fU][Ps][mA][Ps][fU][Ps][mA][Ps][fA][Ps][mA] |
| 1811 | 303 | 24203 | [5Phos][mU][Ps][fA][Ps][mA][fU][mC][fC][mA][fU][mU][fG][mU] |
| | | | [fC][mA][fU][Ps][mA][Ps][fG][Ps][mG][Ps][fU][Ps][mU] |
| 1812 | 304 | 24204 | [5Phos][mU][Ps][fA][Ps][mU][fC][mC][fA][mU][fU][mG][fU][mC] |
| | | | [fA][mU][fA][Ps][mG][Ps][fG][Ps][mU][Ps][fU][Ps][mA] |
| 1813 | 305 | 24205 | [5Phos][mU][Ps][fA][Ps][mG][fA][mA][fA][mU][fC][mC][fA][mU] |
| | | | [fU][mG][fU][Ps][mC][Ps][fA][Ps][mU][Ps][fA][Ps][mG] |
| 1814 | 306 | 24206 | [5Phos][mU][Ps][fA][Ps][mG][fA][mC][fA][mU][fA][mU][fU][mC] |
| | | | [fU][mU][fU][Ps][mA][Ps][fA][Ps][mC][Ps][fU][Ps][mU] |
| 1815 | 307 | 24207 | [5Phos][mU][Ps][fA][Ps][mG][fU][mG][fC][mA][fG][mA][fU][mU] |
| | | | [fC][mC][fC][Ps][mU][Ps][fC][Ps][mC][Ps][fA][Ps][mC] |
| 1816 | 308 | 24208 | [5Phos][mU][Ps][fU][Ps][mC][fC][mA][fU][mU][fG][mU][fC][mA] |
| | | | [fU][mA][fG][Ps][mG][Ps][fU][Ps][mU][Ps][fA][Ps][mU] |
| 1817 | 309 | 24209 | [5Phos][mU][Ps][fG][Ps][mA][fC][mA][fU][mC][fU][mU][fU][mG] |
| | | | [fA][mA][fC][Ps][mA][Ps][fC][Ps][mC][Ps][fU][Ps][mU] |
| 1818 | 310 | 24210 | [5Phos][mU][Ps][fC][Ps][mA][fU][mU][fG][mU][fC][mA][fU][mA] |
| | | | [fG][mG][fU][Ps][mU][Ps][fA][Ps][mU][Ps][fU][Ps][mG] |
| 1819 | 311 | 24211 | [5Phos][mU][Ps][fG][Ps][mA][fA][mG][fA][mG][fA][mA][fA][mU] |
| | | | [fC][mC][fA][Ps][mU][Ps][fU][Ps][mG][Ps][fU][Ps][mC] |
| 1820 | 312 | 24212 | [5Phos][mU][Ps][fA][Ps][mC][fA][mU][fA][mU][fU][mC][fU][mU] |
| | | | [fU][mA][fA][Ps][mC][Ps][fU][Ps][mU][Ps][fC][Ps][mA] |
| 1821 | 313 | 24213 | [5Phos][mU][Ps][fA][Ps][mG][fU][mC][fC][mU][fU][mU][fU][mA] |
| | | | [fC][mA][fC][Ps][mU][Ps][fC][Ps][mA][Ps][fA][Ps][mA] |
| 1822 | 314 | 24214 | [5Phos][mU][Ps][fA][Ps][mU][fU][mU][fU][mC][fC][mU][fU][mG] |
| | | | [fA][mA][fA][Ps][mG][Ps][fA][Ps][mU][Ps][fC][Ps][mC] |
| 1823 | 315 | 24215 | [5Phos][mU][Ps][fG][Ps][mA][fA][mA][fU][mU][fG][mU][fA][mU] |
| | | | [fU][mU][fU][Ps][mA][Ps][fU][Ps][mC][Ps][fU][Ps][mG] |
| 1824 | 316 | 24216 | [5Phos][mU][Ps][fG][Ps][mU][fA][mA][fU][mU][fU][mC][fA][mA] |
| | | | [fA][mA][fU][Ps][mU][Ps][fC][Ps][mU][Ps][fU][Ps][mA] |
| 1825 | 317 | 24217 | [5Phos][mU][Ps][fA][Ps][mA][fA][mA][fU][mU][fC][mU][fU][mA] |
| | | | [fA][mA][fG][Ps][mU][Ps][fU][Ps][mC][Ps][fU][Ps][mU] |
| 1826 | 318 | 24218 | [5Phos][mU][Ps][fG][Ps][mA][fA][mU][fU][mU][fU][mG][fG][mU] |
| | | | [fU][mC][fU][Ps][mG][Ps][fC][Ps][mU][Ps][fC][Ps][mU] |
| 1827 | 319 | 24219 | [5Phos][mU][Ps][fG][Ps][mU][fC][mA][fU][mU][fU][mU][fA][mU] |
| | | | [fA][mA][fU][Ps][mU][Ps][fA][Ps][mU][Ps][fG][Ps][mU] |
| 1828 | 320 | 24220 | [5Phos][mU][Ps][fC][Ps][mA][fA][mA][fU][mC][fC][mU][fG][mU] |
| | | | [fA][mC][fU][Ps][mG][Ps][fA][Ps][mC][Ps][fA][Ps][mA] |
| 1829 | 321 | 24221 | [5Phos][mU][Ps][fG][Ps][mA][fU][mA][fA][mC][fU][mU][fU][mU] |
| | | | [fA][mA][fU][Ps][mA][Ps][fG][Ps][mA][Ps][fG][Ps][mA] |
| 1830 | 322 | 24222 | [5Phos][mU][Ps][fU][Ps][mU][fA][mA][fG][mU][fC][mU][fU][mC] |
| | | | [fU][mC][fU][Ps][mU][Ps][fA][Ps][mU][Ps][fU][Ps][mC] |
| 1831 | 323 | 24223 | [5Phos][mU][Ps][fA][Ps][mU][fA][mA][fU][mU][fC][mC][fA][mA] |
| | | | [fU][mA][fU][Ps][mG][Ps][fA][Ps][mU][Ps][fC][Ps][mA] |
| 1832 | 324 | 24224 | [5Phos][mU][Ps][fG][Ps][mA][fU][mA][fA][mA][fU][mG][fA][mA] |
| | | | [fC][mA][fU][Ps][mG][Ps][fG][Ps][mC][Ps][fC][Ps][mU] |
| 1833 | 325 | 24225 | [5Phos][mU][Ps][fA][Ps][mA][fG][mG][fU][mU][fC][mA][fU][mC] |
| | | | [fA][mU][fU][Ps][mU][Ps][fU][Ps][mC][Ps][fU][Ps][mU] |
| 1834 | 326 | 24226 | [5Phos][mU][Ps][fG][Ps][mG][fA][mA][fG][mU][fG][mC][fU][mA] |
| | | | [fU][mA][fA][Ps][mA][Ps][fA][Ps][mC][Ps][fA][Ps][mU] |
| 1835 | 327 | 24227 | [5Phos][mU][Ps][fC][Ps][mA][fA][mG][fU][mA][fC][mU][fC][mU] |
| | | | [fU][mA][fA][Ps][mA][Ps][fG][Ps][mC][Ps][fA][Ps][mA] |
| 1836 | 328 | 24228 | [5Phos][mU][Ps][fC][Ps][mC][fA][mA][fU][mG][fA][mU][fU][mU] |
| | | | [fC][mC][fU][Ps][mG][Ps][fU][Ps][mU][Ps][fU][Ps][mC] |
| 1837 | 329 | 24229 | [5Phos][mU][Ps][fA][Ps][mU][fG][mG][fU][mA][fU][mA][fU][mU] |
| | | | [fC][mA][fU][Ps][mU][Ps][fU][Ps][mC][Ps][fC][Ps][mA] |
| 1838 | 330 | 24230 | [5Phos][mU][Ps][fA][Ps][mA][fC][mA][fA][mG][fA][mU][fG][mA] |
| | | | [fA][mC][fU][Ps][mU][Ps][fC][Ps][mC][Ps][fC][Ps][mA] |
| 1839 | 331 | 24231 | [5Phos][mU][Ps][fG][Ps][mA][fA][mC][fU][mU][fC][mA][fG][mG] |
| | | | [fA][mA][fU][Ps][mU][Ps][fU][Ps][mU][Ps][fA][Ps][mG] |
| 1840 | 332 | 24232 | [5Phos][mU][Ps][fA][Ps][mG][fU][mC][fU][mU][fC][mU][fC][mU] |
| | | | [fU][mA][fU][Ps][mU][Ps][fC][Ps][mC][Ps][fA][Ps][mA] |
| 1841 | 333 | 24233 | [5Phos][mU][Ps][fA][Ps][mA][fU][mG][fU][mU][fU][mA][fU][mA] |
| | | | [fC][mU][fU][Ps][mU][Ps][fG][Ps][mA][Ps][fU][Ps][mA] |
| 1842 | 334 | 24234 | [5Phos][mU][Ps][fC][Ps][mG][fG][mA][fA][mU][fC][mG][fU][mA] |
| | | | [fC][mA][fC][Ps][mA][Ps][fA][Ps][mA][Ps][fG][Ps][mG] |
| 1843 | 335 | 24235 | [5Phos][mU][Ps][fA][Ps][mU][fA][mC][fC][mU][fC][mU][fG][mC] |
| | | | [fU][mC][fU][Ps][mU][Ps][fC][Ps][mU][Ps][fG][Ps][mA] |
| 1844 | 336 | 24236 | [5Phos][mU][Ps][fA][Ps][mU][fC][mA][fA][mU][fU][mU][fC][mU] |
| | | | [fU][mC][fU][Ps][mA][Ps][fC][Ps][mC][Ps][fA][Ps][mU] |
| 1845 | 337 | 24237 | [5Phos][mU][Ps][fA][Ps][mA][fC][mA][fU][mU][fG][mU][fG][mU] |
| | | | [fU][mU][fU][Ps][mG][Ps][fC][Ps][mA][Ps][fU][Ps][mU] |
| 1846 | 338 | 24238 | [5Phos][mU][Ps][fA][Ps][mA][fC][mU][fU][mU][fA][mU][fA][mA] |
| | | | [fG][mC][fA][Ps][mU][Ps][fA][Ps][mU][Ps][fG][Ps][mC] |
| 1847 | 339 | 24239 | [5Phos][mU][Ps][fA][Ps][mG][fG][mA][fU][mA][fA][mC][fU][mU] |
| | | | [fU][mU][fA][Ps][mA][Ps][fU][Ps][mA][Ps][fG][Ps][mA] |
| 1848 | 340 | 24240 | [5Phos][mU][Ps][fU][Ps][mU][fU][mA][fU][mU][fG][mG][fU][mU] |
| | | | [fG][mA][fU][Ps][mA][Ps][fC][Ps][mU][Ps][fG][Ps][mU] |
| 1849 | 341 | 24241 | [5Phos][mU][Ps][fG][Ps][mC][fA][mA][fC][mU][fG][mU][fU][mU] |
| | | | [fU][mC][fU][Ps][mU][Ps][fC][Ps][mU][Ps][fG][Ps][mG] |
| 1850 | 342 | 24242 | [5Phos][mU][Ps][fG][Ps][mC][fU][mU][fU][mG][fA][mU][fA][mC] |
| | | | [fA][mA][fC][Ps][mU][Ps][fU][Ps][mC][Ps][fC][Ps][mA] |
| 1851 | 343 | 24243 | [5Phos][mU][Ps][fC][Ps][mA][fA][mA][fG][mC][fU][mU][fC][mU] |
| | | | [fC][mU][fC][Ps][mU][Ps][fU][Ps][mC][Ps][fA][Ps][mA] |
| 1852 | 344 | 24244 | [5Phos][mU][Ps][fG][Ps][mG][fA][mA][fC][mU][fC][mC][fU][mU] |
| | | | [fU][mC][fG][Ps][mU][Ps][fC][Ps][mU][Ps][fG][Ps][mC] |
| 1853 | 345 | 24245 | [5Phos][mU][Ps][fA][Ps][mU][fG][mA][fC][mA][fG][mU][fU][mC] |
| | | | [fU][mU][fU][Ps][mG][Ps][fA][Ps][mC][Ps][fU][Ps][mG] |
| 1854 | 346 | 24246 | [5Phos][mU][Ps][fU][Ps][mG][fC][mA][fG][mA][fA][mU][fA][mA] |
| | | | [fC][mA][fU][Ps][mG][Ps][fU][Ps][mC][Ps][fC][Ps][mA] |
| 1855 | 347 | 24247 | [5Phos][mU][Ps][fA][Ps][mG][fA][mA][fG][mU][fC][mC][fU][mA] |
| | | | [fU][mA][f G][Ps][mU][Ps][fU][Ps][mG][Ps][fU][Ps][mA] |
| 1856 | 348 | 24248 | [5Phos][mU][Ps][fA][Ps][mU][fA][mA][fC][mU][fU][mU][fU][mA] |
| | | | [fA][mU][fA][Ps][mG][Ps][fA][Ps][mG][Ps][fA][Ps][mU] |
| 1857 | 349 | 24249 | [5Phos][mU][Ps][fC][Ps][mU][fA][mA][fG][mA][fU][mU][fU][mC] |
| | | | [fU][mU][fU][Ps][mU][Ps][fC][Ps][mC][Ps][fA][Ps][mA] |
| 1858 | 350 | 24250 | [5Phos][mU][Ps][fA][Ps][mU][fA][mA][fA][mU][fG][mA][fA][mC] |
| | | | [fA][mU][fG][Ps][mG][Ps][fC][Ps][mC][Ps][fU][Ps][mG] |

[0321] The first nucleobase on the terminal 5′ position (the sequences in the table are presented from a 5′(left) to a 3′(right direction) can be freely selected from U, A, G and C instead of the nucleobase disclosed in the table.

[0322] Note=Each of the above constructs may or may not have a phosphate modification at the 5′ end group. Furthermore, and independently, each of the above constructs may or may not have a “3× GalNAc” coupled to the 3′ end group. Advantageously the construct contains a 3× GalNAc ligand. Particularly advantageous are constructs, which in addition have a 5′ phosphate, even though this is not a strict requirement, given that in the absence thereof, mammalian cells will add such phosphate in case it is absent from the molecule as administered.

TABLE 3d
Modified C5 sense constructs

| SEQ | Construct | Sense | |
|---|---|---|---|
| ID No. | ID NO. | ID | Modified 15 mer C5 Sense constructs |
| 1859 | 351 | 14151 | [fC][Ps][mA][Ps][fG][mG][fC][mC][fA][mA][fA][mC][fU][mG][fU |
| | | | ][Ps][mG][Ps][fA][3XGalNAc] |
| 1860 | 352 | 14152 | [fU][Ps][mG][Ps][fA][mC][fU][mU][fC][mA][fA][mG][fA][mU][fU |
| | | | ][Ps][mC][Ps][fA][3XGalNAc] |
| 1861 | 353 | 14153 | [fC][Ps][mA][Ps][fG][mC][fU][mA][fC][mA][fA][mG][fC][mC][fC |
| | | | ][Ps][mA][Ps][fA][3XGalNAc] |
| 1862 | 354 | 14154 | [fA][Ps][mC][Ps][fU][mA][fU][mA][fA][mU][fU][mA][fC][mU][fU] |
| | | | [Ps][mG][Ps][fA][3XGalNAc] |
| 1863 | 355 | 14155 | [fC][Ps][mA][Ps][fG][mA][fC][mA][fA][mA][fC][mC][fU][mG][fU] |
| | | | [Ps][mU][Ps][fA][3XGalNAc] |
| 1864 | 356 | 14156 | [fU][Ps][mG][Ps][fU][mU][fA][mA][fA][mA][fU][mG][fU][mC][fU |
| | | | ][Ps][mG][Ps][fA][3XGalNAc] |
| 1865 | 357 | 14157 | [fC][Ps][mA][Ps][fA][mC][fC][mA][fG][mC][fU][mC][fC][mA][fG |
| | | | ][Ps][mG][Ps][fA][3XGalNAc] |
| 1866 | 358 | 14158 | [fU][Ps][mU][Ps][fA][mC][fU][mU][fG][mA][fU][mU][fU][mU][fA |
| | | | ][Ps][mU][Ps][fA][3XGalNAc] |
| 1867 | 359 | 14159 | [fA][Ps][mG][Ps][fG][mC][fC][mA][fA][mA][fC][mU][fG][mU][fG |
| | | | ][Ps][mU][Ps][fA][3XGalNAc] |
| 1868 | 360 | 14160 | [fG][Ps][mA][Ps][fC][mU][fU][mC][fA][mA][fG][mA][fU][mU][fC |
| | | | ][Ps][mC][Ps][fA][3XGalNAc] |
| 1869 | 361 | 14161 | [fU][Ps][mG][Ps][fU][mG][fU][mU][fA][mA][fA][mA][fU][mG][fU |
| | | | ][Ps][mC][Ps][fA][3XGalNAc] |
| 1870 | 362 | 14162 | [fC][Ps][mU][Ps][fU][mU][fU][mC][fC][mU][fG][mA][fC][mU][fU |
| | | | ][Ps][mC][Ps][fA][3XGalNAc] |
| 1871 | 363 | 14163 | [fC][Ps][mC][Ps][fA][mG][fG][mC][fC][mA][fA][mA][fC][mU][fG |
| | | | ][Ps][mU][Ps][fA][3XGalNAc] |
| 1872 | 364 | 14164 | [fU][Ps][mA][Ps][fA][mC][fU][mC][fA][mC][fU][mA][fU][mA][fA] |
| | | | [Ps][mU][Ps][fA][3XGalNAc] |
| 1873 | 365 | 14165 | [fG][Ps][mA][Ps][fC][mA][fU][mC][fU][mG][fA][mC][fU][mU][fG |
| | | | ][Ps][mG][Ps][fA][3XGalNAc] |
| 1874 | 366 | 14166 | [fU][Ps][mA][Ps][fU][mC][fU][mC][fU][mU][fU][mU][fC][mC][fU |
| | | | ][Ps][mG][Ps][fA][3XGalNAc] |
| 1875 | 367 | 14167 | [fA][Ps][mG][Ps][fA][mA][fU][mA][fU][mG][fU][mC][fU][mU][fG |
| | | | ][Ps][mC][Ps][fA][3XGalNAc] |
| 1876 | 368 | 14168 | [fU][Ps][mG][Ps][fG][mA][fA][mA][fU][mU][fG][mG][fC][mC][fU |
| | | | ][Ps][mU][Ps][fA][3XGalNAc] |
| 1877 | 369 | 14169 | [fC][Ps][mA][Ps][fC][mU][fA][mU][fA][mA][fU][mU][fA][mC][fU] |
| | | | [Ps][mU][Ps][fA][3XGalNAc] |
| 1878 | 370 | 14170 | [fA][Ps][mU][Ps][fU][mA][fC][mU][fU][mG][fA][mU][fU][mU][fU |
| | | | ][Ps][mA][Ps][fA][3XGalNAc] |
| 1879 | 371 | 14171 | [fC][Ps][mU][Ps][fA][mU][fA][mA][fU][mU][fA][mC][fU][mU][fG] |
| | | | [Ps][mA][Ps][fA][3XGalNAc] |
| 1880 | 372 | 14172 | [fC][Ps][mC][Ps][fU][mC][fU][mG][fG][mA][fA][mA][fU][mU][fG |
| | | | ][Ps][mG][Ps][fA][3XGalNAc] |
| 1881 | 373 | 14173 | [fC][Ps][mU][Ps][fC][mA][fC][mU][fA][mU][fA][mA][fU][mU][fA] |
| | | | [Ps][mC][Ps][fA][3XGalNAc] |
| 1882 | 374 | 14174 | [fC][Ps][mA][Ps][fA][mC][fA][mA][fG][mU][fA][mC][fC][mU][fU] |
| | | | [Ps][mU][Ps][fA][3XGalNAc] |
| 1883 | 375 | 14175 | [fU][Ps][mC][Ps][fU][mG][fA][mA][fA][mC][fA][mG][fC][mA][fG |
| | | | ][Ps][mU][Ps][fA][3XGalNAc] |
| 1884 | 376 | 14176 | [fU][Ps][mU][Ps][fC][mU][fG][mA][fA][mA][fC][mA][fG][mC][fA] |
| | | | [Ps][mG][Ps][fA][3XGalNAc] |
| 1885 | 377 | 14177 | [fC][Ps][mA][Ps][fA][mG][fU][mA][fC][mC][fU][mU][fU][mA][fU] |
| | | | [Ps][mA][Ps][fA][3XGalNAc] |
| 1886 | 378 | 14178 | [fA][Ps][mA][Ps][fG][mG][fA][mA][fC][mU][fG][mU][fU][mU][fA |
| | | | ][Ps][mC][Ps][fA][3XGalNAc] |
| 1887 | 379 | 14179 | [fU][Ps][mC][Ps][fA][mG][fC][mC][fA][mA][fA][mG][fU][mU][fA] |
| | | | [Ps][mC][Ps][fA][3XGalNAc] |
| 1888 | 380 | 14180 | [fC][Ps][mU][Ps][fG][mU][fU][mU][fA][mC][fA][mA][fC][mU][fA] |
| | | | [Ps][mU][Ps][fA][3XGalNAc] |
| 1889 | 381 | 14181 | [fA][Ps][mG][Ps][fU][mU][fA][mA][fA][mG][fA][mA][fU][mA][fU] |
| | | | [Ps][mG][Ps][fA][3XGalNAc] |
| 1890 | 382 | 14182 | [fG][Ps][mU][Ps][fA][mA][fA][mA][fG][mG][fA][mC][fU][mG][fC |
| | | | ][Ps][mU][Ps][fA][3XGalNAc] |
| 1891 | 383 | 14183 | [fC][Ps][mA][Ps][fA][mA][fA][mU][fA][mA][fC][mU][fC][mA][fC] |
| | | | [Ps][mU][Ps][fA][3XGalNAc] |
| 1892 | 384 | 14184 | [fC][Ps][mA][Ps][fA][mA][fG][mA][fU][mG][fU][mC][fU][mU][fC |
| | | | ][Ps][mC][Ps][fA][3XGalNAc] |
| 1893 | 385 | 14185 | [fG][Ps][mU][Ps][fG][mU][fA][mA][fA][mA][fG][mG][fA][mC][fU |
| | | | ][Ps][mG][Ps][fA][3XGalNAc] |
| 1894 | 386 | 14186 | [fA][Ps][mU][Ps][fU][mG][fA][mC][fA][mA][fA][mA][fU][mA][fA] |
| | | | [Ps][mC][Ps][fA][3XGalNAc] |
| 1895 | 387 | 14187 | [fC][Ps][mA][Ps][fU][mA][fU][mU][fC][mU][fG][mU][fU][mG][fU |
| | | | ][Ps][mA][Ps][fA][3XGalNAc] |
| 1896 | 388 | 14188 | [fU][Ps][mA][Ps][fU][mU][fG][mA][fC][mA][fA][mA][fA][mU][fA] |
| | | | [Ps][mA][Ps][fA][3XGalNAc] |
| 1897 | 389 | 14189 | [fU][Ps][mU][Ps][fU][mU][fC][mC][fU][mG][fA][A][fG][m][fC |
| | | | ][Ps][mU][Ps][fA][3XGalNAc] |
| 1898 | 390 | 14190 | [fA][Ps][mU][Ps][fU][mA][fU][mC][fU][mC][fU][mU][fU][mU][fC |
| | | | ][Ps][mC][Ps][fA][3XGalNAc] |
| 1899 | 391 | 14191 | [fU][Ps][mA][Ps][fU][mA][fU][mU][fG][mC][fU][mG][fU][mA][fA |
| | | | ][Ps][mC][Ps][fA][3XGalNAc] |
| 1900 | 392 | 14192 | [fU][Ps][mU][Ps][fG][mC][fA][mU][fA][mU][fG][mC][fU][mU][fA |
| | | | ][Ps][mU][Ps][fA][3XGalNAc] |
| 1901 | 393 | 14193 | [fA][Ps][mA][Ps][fG][mU][fU][mA][fA][mA][fG][mA][fA][mU][fA] |
| | | | [Ps][mU][Ps][fA][3XGalNAc] |
| 1902 | 394 | 14194 | [fG][Ps][mU][Ps][fU][mC][fA][mA][fA][mG][fA][mU][fG][mU][fC |
| | | | ][Ps][mU][Ps][fA][3XGalNAc] |
| 1903 | 395 | 14195 | [fA][Ps][mA][Ps][fG][mA][fU][mG][fU][mC][fU][mU][fC][mC][fU |
| | | | ][Ps][mG][Ps][fA][3XGalNAc] |
| 1904 | 396 | 14196 | [fC][Ps][mU][Ps][fU][mU][fA][mU][fA][mU][fU][mG][fC][mU][fG |
| | | | ][Ps][mU][Ps][fA][3XGalNAc] |
| 1905 | 397 | 14197 | [fU][Ps][mA][Ps][fA][mC][fC][mU][fA][mU][fG][mA][fC][mA][fA] |
| | | | [Ps][mU][Ps][fA][3XGalNAc] |
| 1906 | 398 | 14198 | [fU][Ps][mG][Ps][fA][mC][fA][mA][fA][mA][fU][mA][fA][mC][fU] |
| | | | [Ps][mC][Ps][fA][3XGalNAc] |
| 1907 | 399 | 14199 | [fA][Ps][mC][Ps][fA][mA][fA][mA][fU][mA][fA][mC][fU][mC][fA] |
| | | | [Ps][mC][Ps][fA][3XGalNAc] |
| 1908 | 400 | 14200 | [fG][Ps][mA][Ps][fC][mA][fA][mA][fA][mU][fA][mA][fC][mU][fC] |
| | | | [Ps][mA][Ps][fA][3XGalNAc] |
| 1909 | 401 | 14201 | [fU][Ps][mU][Ps][fU][mC][fA][mA][fG][mG][fA][mA][fA][mA][fU] |
| | | | [Ps][mU][Ps][fA][3XGalNAc] |
| 1910 | 402 | 14202 | [fU][Ps][mA][Ps][fU][mU][fG][mC][fU][mG][fU][mA][fA][mC][fA |
| | | | ][Ps][mG][Ps][fA][3XGalNAc] |
| 1911 | 403 | 14203 | [fU][Ps][mA][Ps][fU][mG][fA][mC][fA][mA][fU][mG][fG][mA][fU |
| | | | ][Ps][mU][Ps][fA][3XGalNAc] |
| 1912 | 404 | 14204 | [fC][Ps][mU][Ps][fA][mU][fG][mA][fC][mA][fA][mU][fG][mG][fA |
| | | | ][Ps][mU][Ps][fA][3XGalNAc] |
| 1913 | 405 | 14205 | [fG][Ps][mA][Ps][fC][mA][fA][mU][fG][mG][fA][mU][fU][mU][fC |
| | | | ][Ps][mU][Ps][fA][3XGalNAc] |
| 1914 | 406 | 14206 | [fU][Ps][mA][Ps][fA][mA][fG][mA][fA][mU][fA][mU][fG][mU][fC] |
| | | | [Ps][mU][Ps][fA][3XGalNAc] |
| 1915 | 407 | 14207 | [[A][Ps][mG][Ps][fG][mG][fA][mA][fU][mC][fU][mG][fC][mA][fC |
| | | | ][Ps][mU][Ps][fA][3XGalNAc] |
| 1916 | 408 | 14208 | [fC][Ps][mC][Ps][fU][mA][fU][mG][fA][mC][fA][mA][fU][mG][fG |
| | | | ][Ps][mA][Ps][fA][3XGalNAc] |
| 1917 | 409 | 14209 | [fU][Ps][mG][Ps][fU][mU][fC][mA][fA][mA][fG][mA][fU][mG][fU |
| | | | ][Ps][mC][Ps][fA][3XGalNAc] |
| 1918 | 410 | 14210 | [fA][Ps][mA][Ps][fC][mC][fU][mA][fU][mG][fA][mC][fA][mA][fU] |
| | | | [Ps][mG][Ps][fA][3XGalNAc] |
| 1919 | 411 | 14211 | [fA][Ps][mU][Ps][fG][mG][fA][mU][fU][mU][fC][mU][fC][mU][fU |
| | | | ][Ps][mC][Ps][fA][3XGalNAc] |
| 1920 | 412 | 14212 | [fG][Ps][mU][Ps][fU][mA][fA][mA][fG][mA][fA][mU][fA][mU][fG] |
| | | | [Ps][mU][Ps][fA][3XGalNAc] |
| 1921 | 413 | 14213 | [fA][Ps][mG][Ps][fU][mG][fU][mA][fA][mA][fA][mG][fG][mA][fC |
| | | | ][Ps][mU][Ps][fA][3XGalNAc] |
| 1922 | 414 | 14214 | [fC][Ps][mU][Ps][fU][mU][fC][mA][fA][mG][fG][mA][fA][mA][fA] |
| | | | [Ps][mU][Ps][fA][3XGalNAc] |
| 1923 | 415 | 14215 | [fU][Ps][mA][Ps][fA][mA][fA][mU][fA][mC][fA][mA][fU][mU][fU] |
| | | | [Ps][mC][Ps][fA][3XGalNAc] |
| 1924 | 416 | 14216 | [fA][Ps][mA][Ps][fU][mU][fU][mU][fG][mA][fA][mA][fU][mU][fA] |
| | | | [Ps][mC][Ps][fA][3XGalNAc] |
| 1925 | 417 | 14217 | [fA][Ps][mC][Ps][fU][mU][fU][mA][fA][mG][fA][mA][fU][mU][fU] |
| | | | [Ps][mU][Ps][fA][3XGalNAc] |
| 1926 | 418 | 14218 | [fC][Ps][mA][Ps][fG][mA][fA][mC][fC][mA][fA][mA][fA][mU][fU] |
| | | | [Ps][mC][Ps][fA][3XGalNAc] |
| 1927 | 419 | 14219 | [fA][Ps][mA][Ps][fU][mU][fA][mU][fA][mA][fA][mA][fU][mG][fA] |
| | | | [Ps][mC][Ps][fA][3XGalNAc] |
| 1928 | 420 | 14220 | [fC][Ps][mA][Ps][fG][mU][fA][mC][fA][mG][fG][mA][fU][mU][fU |
| | | | ][Ps][mG][Ps][fA][3XGalNAc] |
| 1929 | 421 | 14221 | [fU][Ps][mA][Ps][fU][mU][fA][mA][fA][mA][fG][mU][fU][mA][fU] |
| | | | [Ps][mC][Ps][fA][3XGalNAc] |
| 1930 | 422 | 14222 | [fA][Ps][mA][Ps][fG][mA][fG][mA][fA][mG][fA][mC][fU][mU][fA] |
| | | | [Ps][mA][Ps][fA][3XGalNAc] |
| 1931 | 423 | 14223 | [fC][Ps][mA][Ps][fU][mA][fU][mU][fG][mG][fA][mA][fU][mU][fA] |
| | | | [Ps][mU][Ps][fA][3XGalNAc] |
| 1932 | 424 | 14224 | [fC][Ps][mA][Ps][fU][mG][fU][mU][fC][mA][fU][mU][fU][mA][fU |
| | | | ][Ps][mC][Ps][fA][3XGalNAc] |
| 1933 | 425 | 14225 | [fA][Ps][mA][Ps][fA][mU][fG][mA][fU][mG][fA][mA][fC][mC][fU] |
| | | | [Ps][mU][Ps][fA][3XGalNAc] |
| 1934 | 426 | 14226 | [fU][Ps][mU][Ps][fU][mA][fU][mA][fG][mC][fA][mC][fU][mU][fC |
| | | | ][Ps][mC][Ps][fA][3XGalNAc] |
| 1935 | 427 | 14227 | [fU][Ps][mU][Ps][fU][mA][fA][mG][fA][mG][fU][mA][fC][mU][fU |
| | | | ][Ps][mG][Ps][fA][3XGalNAc] |
| 1936 | 428 | 14228 | [fC][Ps][mA][Ps][fG][mG][fA][mA][fA][mU][fC][mA][fU][mU][fG |
| | | | ][Ps][mG][Ps][fA][3XGalNAc] |
| 1937 | 429 | 14229 | [fA][Ps][mA][Ps][fU][mG][fA][mA][fU][mA][fU][mA][fC][mC][fA] |
| | | | [Ps][mU][Ps][fA][3XGalNAc] |
| 1938 | 430 | 14230 | [fA][Ps][mA][Ps][fG][mU][fU][mC][fA][mU][fC][mU][fU][mG][fU |
| | | | ][Ps][mU][Ps][fA][3XGalNAc] |
| 1939 | 431 | 14231 | [fA][Ps][mA][Ps][fU][mU][fC][mC][fU][mG][fA][mA][fG][mU][fU |
| | | | ][Ps][mC][Ps][fA][3XGalNAc] |
| 1940 | 432 | 14232 | [fA][Ps][mA][Ps][fU][mA][fA][mG][fA][mG][fA][mA][fG][mA][fC] |
| | | | [Ps][mU][Ps][fA][3XGalNAc] |
| 1941 | 433 | 14233 | [fA][Ps][mA][Ps][fA][mG][fU][mA][fU][mA][fA][mA][fC][mA][fU] |
| | | | [Ps][mU][Ps][fA][3XGalNAc] |
| 1942 | 434 | 14234 | [fU][Ps][mG][Ps][fU][mG][fU][mA][fC][mG][fA][mU][fU][mC][fC |
| | | | ][Ps][mG][Ps][fA][3XGalNAc] |
| 1943 | 435 | 14235 | [fA][Ps][mA][Ps][fG][mA][fG][mC][fA][mG][fA][mG][fG][mU][fA |
| | | | ][Ps][mU][Ps][fA][3XGalNAc] |
| 1944 | 436 | 14236 | [fU][Ps][mA][Ps][fG][mA][fA][mG][fA][mA][fA][mU][fU][mG][fA] |
| | | | [Ps][mU][Ps][fA][3XGalNAc] |
| 1945 | 437 | 14237 | [fC][Ps][mA][Ps][fA][mA][fA][mC][fA][mC][fA][mA][fU][mG][fU] |
| | | | [Ps][mU][Ps][fA][3XGalNAc] |
| 1946 | 438 | 14238 | [fA][Ps][mU][Ps][fG][mC][fU][mU][fA][mU][fA][mA][fA][mG][fU] |
| | | | [Ps][mU][Ps][fA][3XGalNAc] |
| 1947 | 439 | 14239 | [fU][Ps][mU][Ps][fA][mA][fA][mA][fG][mU][fU][mA][fU][mC][fC] |
| | | | [Ps][mU][Ps][fA][3XGalNAc] |
| 1948 | 440 | 14240 | [fU][Ps][mA][Ps][fU][mC][fA][mA][fC][mC][fA][mA][fU][mA][fA] |
| | | | [Ps][mA][Ps][fA][3XGalNAc] |
| 1949 | 441 | 14241 | [fA][Ps][mA][Ps][fG][mA][fA][mA][fA][mC][fA][mG][fU][mU][fG] |
| | | | [Ps][mC][Ps][fA][3XGalNAc] |
| 1950 | 442 | 14242 | [fA][Ps][mG][Ps][fU][mU][fG][mU][fA][mU][fC][mA][fA][mA][fG |
| | | | ][Ps][mC][Ps][fA][3XGalNAc] |
| 1951 | 443 | 14243 | [fA][Ps][mG][Ps][fA][mG][fA][mG][fA][mA][fG][mC][fU][mU][fU |
| | | | ][Ps][mG][Ps][fA][3XGalNAc] |
| 1952 | 444 | 14244 | [fA][Ps][mC][Ps][fG][mG][fA][mA][fA][mG][fG][mA][fG][mU][fC |
| | | | ][Ps][mC][Ps][fA][3XGalNAc] |
| 1953 | 445 | 14245 | [fC][Ps][mA][Ps][fA][mA][fG][mA][fA][mC][fU][mG][fU][mC][fA] |
| | | | [Ps][mU][Ps][fA][3XGalNAc] |
| 1954 | 446 | 14246 | [fC][Ps][mA][Ps][fU][mG][fU][mU][fA][mU][fU][mC][fU][mG][fC |
| | | | ][Ps][mA][Ps][fA][3XGalNAc] |
| 1955 | 447 | 14247 | [fA][Ps][mC][Ps][fU][mA][fU][mA][fG][mG][fA][mC][fU][mU][fC |
| | | | ][Ps][mU][Ps][fA][3XGalNAc] |
| 1956 | 448 | 14248 | [fC][Ps][mU][Ps][fA][mU][fU][mA][fA][mA][fA][mG][fU][mU][fA] |
| | | | [Ps][mU][Ps][fA][3XGalNAc] |
| 1957 | 449 | 14249 | [fA][Ps][mA][Ps][fA][mA][fG][mA][fA][mA][fU][mC][fU][mU][fA] |
| | | | [Ps][mG][Ps][fA][3XGalNAc] |
| 1958 | 450 | 14250 | [fC][Ps][mC][Ps][fA][mU][fG][mU][fU][mC][fA][mU][fU][mU][fA |
| | | | ][Ps][mU][Ps][fA][3XGalNAc] |

TABLE 3e
Modified C5 hairpin constructs

| | | Antisense | | |
|---|---|---|---|---|
| SEQ ID | Construct | ID + | Expt'l | |
| No. | ID NO. | Sense ID | ID | Modified 33 mer C5 Hairpin constructs |
| 1959 | 451 | 14151_ | C5-m-01 | [5Phos][mU][Ps][fC][Ps][mA][fC][mA][fG][mU][f |
| | | 24151 | | U][mU][fG][mG][fC][mC][fU][Ps][mG]Ps][G]P |
| | | | | s][mA][Ps][fG][Ps][mA][Ps][mA] |
| | | | | [fG][mG][fC][mC][fA][mA][fA][mC][fU][mG][fU][ |
| | | | | Ps][mG][Ps][fA][3xGalNac] |
| 1960 | 452 | 14152_ | C5-m-02 | [5Phos][mU][Ps][fG][Ps][mA][fA][mU][fC][mU][f |
| | | 24152 | | U][mG][fA][mA][fG][mU][fC][Ps][mA][Ps][fG][Ps |
| | | | | ][mG][Ps][fA][Ps][mA][Ps][mG] |
| | | | | [fA][mC][fU][mU][fC][mA][fA][mG][fA][mU][fU][P |
| | | | | s][mC][Ps][fA][3xGalNac] |
| 1961 | 453 | 14153_ | C5-m-03 | [5Phos][mU][Ps][fU][Ps][mG][fG][mG][fC][mU][f |
| | | 24153 | | U][mG][fU][mA][fG][mC][fU][Ps][mG][Ps][fG][P |
| | | | | s][mC][Ps][fA][Ps][mC][Ps][mA] |
| | | | | [fG][mC][fU][mA][fC][mA][fA][mG][fC][mC][fC][ |
| | | | | Ps][mA][Ps][[A][3xGalNac] |
| 1962 | 454 | 14154_ | C5-m-04 | [5Phos][mU][Ps][fC][Ps][mA][fA][mG][fU][mA][f |
| | | 24154 | | A][mU][fU][mA][fU][mA][fG][Ps][mU][Ps][fG][Ps |
| | | | | ][mA][Ps][fG][Ps][mU][Ps][mC] |
| | | | | [fU][mA][fU][mA][fA][mU][fU][mA][fC][mU][fU][P |
| | | | | s][mG][Ps][fA][3xGalNac] |
| 1963 | 455 | 14155_ | C5-m-05 | [5Phos][mU][Ps][fA][Ps][mA][fC][mA][fG][mG][f |
| | | 24155 | | U][mU][fU][mG][fU][mC][fU][Ps][mG][Ps][fU][Ps |
| | | | | ][mA][Ps][fU][Ps][mG][Ps][mA] |
| | | | | [fG][mA][fC][mA][fA][mA][fC][mC][fU][mG][fU][ |
| | | | | Ps][mU][Ps][fA][3xGalNac] |
| 1964 | 456 | 14156_ | C5-m-06 | [5Phos][mU][Ps][fC][Ps][mA][fG][mA][fC][mA][f |
| | | 24156 | | U][mU][fU][mU][fA][mA][fC][Ps][mA][Ps][fC][Ps] |
| | | | | [mA][Ps][fG][Ps][mA][Ps][mG] |
| | | | | [fU][mU][fA][mA][fA][mA][fU][mG][fU][mC][fU][P |
| | | | | s][mG][Ps][fA][3xGalNac] |
| 1965 | 457 | 14157_ | C5-m-07 | [5Phos][mU][Ps][fC][Ps][mC][fU][mG][fG][mA][f |
| | | 24157 | | G][mC][fU][mG][fG][mU][fU][Ps][mG][Ps][fC][P |
| | | | | s][mC][Ps][fA][Ps][mC][Ps][mA] |
| | | | | [fA][mC][fC][mA][fG][mC][fU][mC][fC][mA][fG][ |
| | | | | Ps][mG][Ps][fA][3xGalNac] |
| 1966 | 458 | 14158_ | C5-m-08 | [5Phos][mU][Ps][fA][Ps][mU][fA][mA][fA][mA][f |
| | | 24158 | | U][mC][fA][mA][fG][mU][fA][Ps][mA][Ps][fU][Ps] |
| | | | | [mU][Ps][fA][Ps][mU][Ps][mU] |
| | | | | [fA][mC][fU][mU][fG][mA][fU][mU][fU][mU][A][ |
| | | | | Ps][mU][Ps][fA][3xGalNac] |
| 1967 | 459 | 14159_ | C5-m-09 | [5Phos][mU][Ps][fA][Ps][mC][fA][mC][fA][mG][f |
| | | 24159 | | U][mU][fU][mG][fG][mC][fC][Ps][mU][Ps][fG][P |
| | | | | s][mG][Ps][fA][Ps][mG][Ps][mG] |
| | | | | [fG][mC][fC][mA][fA][mA][fC][mU][fG][mU][fG][ |
| | | | | Ps][mU][Ps][fA][3xGalNac] |
| 1968 | 460 | 14160_ | C5-m-10 | [5Phos][mU][Ps][fG][Ps][mG][fA][mA][fU][mC][f |
| | | 24160 | | U][mU][fG][mA][fA][mG][fU][Ps][mC][Ps][fA][Ps |
| | | | | ][mG][Ps][fG][Ps][mA][Ps][mA] |
| | | | | [fC][mU][fU][mC][fA][mA][fG][mA][fU][mU][fC][ |
| | | | | Ps][mC][Ps][fA]3xGalNac] |
| 1969 | 461 | 14161_ | C5-m-11 | [5Phos][mU][Ps][fG][Ps][mA][fC][mA][fU][mU][f |
| | | 24161 | | U][mU][fA][mA][fC][mA][fC][Ps][mA][Ps][fG][Ps] |
| | | | | [mA][Ps][fA][Ps][mC][Ps][mG] |
| | | | | [fU][mG][fU][mU][fA][mA][fA][mA][fU][mG][fU][ |
| | | | | Ps][mC][Ps][fA][3xGalNac] |
| 1970 | 462 | 14162_ | C5-m-12 | [5Phos][mU][Ps][fG][Ps][mA][fA][mG][fU][mC][f |
| | | 24162 | | A][mG][fG][mA][fA][mA][fA][Ps][mG][Ps][fA][Ps] |
| | | | | [mG][Ps][fA][Ps][mU][Ps][mU] |
| | | | | [fU][mU][fU][mC][fC][mU][fG][mA][fC][mU][fU][ |
| | | | | Ps][mC][Ps][fA][3xGalNac] |
| 1971 | 463 | 14163_ | C5-m-13 | [5Phos][mU][Ps][fA][Ps][mC][fA][mG][fU][mU][f |
| | | 24163 | | U][mG][fG][mC][fC][mU][fG][Ps][mG][Ps][fA][P |
| | | | | s][mG][Ps][fA][Ps][mA][Ps][mC] |
| | | | | [fA][mG][fG][mC][fC][mA][fA][mA][fC][mU][fG][ |
| | | | | Ps][mU][Ps][fA][3xGalNac] |
| 1972 | 464 | 14164_ | C5-m-14 | [5Phos][mU][Ps][fA][Ps][mU][fU][mA][fU][mA][f |
| | | 24164 | | G][mU][fG][mA][fG][mU][fU][Ps][mA][Ps][fU][Ps |
| | | | | ][mU][Ps][fU][Ps][mU][Ps][mA] |
| | | | | [fA][mC][fU][mC][fA][mC][fU][mA][fU][mA][fA][P |
| | | | | s][mU][Ps][[A][3xGalNac] |
| 1973 | 465 | 14165_ | C5-m-15 | [5Phos][mU][Ps][fC][Ps][mC][fA][mA][fG][mU][f |
| | | 24165 | | C][mA][fG][mA][fU][mG][fU][Ps][mC][Ps][fU][Ps |
| | | | | ][mC][Ps][fU][Ps][mU][Ps][mA] |
| | | | | [fC][mA][fU][mC][fU][mG][fA][mC][fU][mU][fG][ |
| | | | | Ps][mG][Ps][fA][3xGalNac] |
| 1974 | 466 | 14166_ | C5-m-16 | [5Phos][mU][Ps][fC][Ps][mA][fG][G][fA][mA][f |
| | | 24166 | | A][mA][fG][mA][fG][mA][fU][Ps][mA][Ps][fA][Ps] |
| | | | | [mU][Ps][fU][Ps][mC][Ps][mA] |
| | | | | [fU][mC][fU][mC][fU][mU][fU][mU][fC][mC][fU][ |
| | | | | Ps][mG][Ps][fA][3xGalNac] |
| 1975 | 467 | 14167_ | C5-m-17 | [5Phos][mU][Ps][fG][Ps][mC][fA][mA][fG][mA][f |
| | | 24167 | | C][mA][fU][mA][fU][mU][fC][Ps][mU][Ps][fU][Ps |
| | | | | ][mU][Ps][fA][Ps][mA][Ps][mG] |
| | | | | [fA][mA][fU][mA][fU][mG][fU][mC][fU][mU][fG][ |
| | | | | Ps][mC][Ps][fA][3xGalNac] |
| 1976 | 468 | 14168_ | C5-m-18 | [5Phos][mU][Ps][fA][Ps][mA][fG][mG][fC][mC][f |
| | | 24168 | | A][mA][fU][mU][fU][mC][fC][Ps][mA][Ps][fG][Ps |
| | | | | ][mA][Ps][fG][Ps][mG][Ps][mG] |
| | | | | [fG][mA][fA][mA][fU][mU][fG][mG][fC][mC][fU][ |
| | | | | Ps][mU][Ps][fA][3xGalNac] |
| 1977 | 469 | 14169_ | C5-m-19 | [5Phos][mU][Ps][fA][Ps][mA][fG][mU][fA][mA][f |
| | | 24169 | | U][mU][fA][mU][fA][mG][fU][Ps][mG][Ps][fA][Ps |
| | | | | ][mG][Ps][fU][Ps][mU][Ps][mA] |
| | | | | [fC][mU][fA][mU][fA][mA][fU][mU][fA][mC][fU][P |
| | | | | s][mU][Ps][fA][3xGalNac] |
| 1978 | 470 | 14170_ | C5-m-20 | [5Phos][mU][Ps][fU][Ps][mA][fA][mA][fA][mU][f |
| | | 24170 | | C][mA][fA][mG][fU][mA][fA][Ps][mU][Ps][fU][Ps] |
| | | | | [mA][Ps][fU][Ps][mA][Ps][mU] |
| | | | | [fU][mA][fC][mU][fU][mG][fA][mU][fU][mU][fU][ |
| | | | | Ps][mA][Ps][fA][3xGalNac] |
| 1979 | 471 | 14171_ | C5-m-21 | [5Phos][mU][Ps][fU][Ps][mC][fA][mA][fG][mU][f |
| | | 24171 | | A][mA][fU][mU][fA][mU][fA][Ps][mG][Ps][fU][Ps] |
| | | | | [mG][Ps][fA][Ps][mG][Ps][mU] |
| | | | | [fA][mU][fA][mA][fU][mU][fA][mC][fU][mU][fG][P |
| | | | | s][mA][Ps][fA]3xGalNac] |
| 1980 | 472 | 14172_ | C5-m-22 | [5Phos][mU][Ps][fC][Ps][mC][fA][mA][fU][mU][f |
| | | 24172 | | U][mC][fC][mA][fG][mA][fG][Ps][mG][Ps][fA][Ps |
| | | | | ][mA][Ps][fG][Ps][mC][Ps][mC] |
| | | | | [fU][mC][fU][mG][fG][mA][fA][mA][fU][mU][fG][ |
| | | | | Ps][mG][Ps][fA]\|3xGalNac] |
| 1981 | 473 | 14173_ | C5-m-23 | [5Phos][mU][Ps][fG][Ps][mU][fA][mA][fU][mU][f |
| | | 24173 | | A][mU][fA][mG][fU][mG][fA][Ps][mG][Ps][fU][Ps |
| | | | | ][mU][Ps][fA][Ps][mU][Ps][mU] |
| | | | | [fC][mA][fC][mU][fA][mU][fA][mA][fU][mU][fA][P |
| | | | | s][mC][Ps][fA]\|3xGalNac] |
| 1982 | 474 | 14174_ | C5-m-24 | [5Phos][mU][Ps][fA][Ps][mA][fA][mG][fG][mU][f |
| | | 24174 | | A][mC][fU][mU][fG][mU][fU][Ps][mG][Ps][fU][Ps |
| | | | | ][mU][Ps][fU][Ps][mA][Ps][mA] |
| | | | | [fA][mC][fA][mA][fG][mU][fA][mC][fC][mU][fU][P |
| | | | | s][mU][Ps][[A][3xGalNac] |
| 1983 | 475 | 14175_ | C5-m-25 | [5Phos][mU][Ps][fA][Ps][mC][fU][mG][fC][mU][f |
| | | 24175 | | G][mU][fU][mU][fC][mA][fG][Ps][mA][Ps][fA][Ps |
| | | | | ][mU][Ps][fC][Ps][mA][Ps][mC] |
| | | | | [fU][mG][fA][mA][fA][mC][fA][mG][fC][mA][fG][ |
| | | | | Ps][mU][Ps][fA]3xGalNac] |
| 1984 | 476 | 14176_ | C5-m-26 | [5Phos][mU][Ps][fC][Ps][mU][fG][mC][fU][mG][f |
| | | 24176 | | U][mU][fU][mC][fA][mG][fA][Ps][mA][Ps][fU][Ps |
| | | | | ][mC][Ps][fA][Ps][mA][Ps][mU] |
| | | | | [fC][mU][fG][mA][fA][mA][fC][mA][fG][mC][fA][P |
| | | | | s][mG][Ps][fA][3xGalNac] |
| 1985 | 477 | 14177_ | C5-m-27 | [5Phos][mU][Ps][fU][Ps][mA][fU][mA][fA][mA][f |
| | | 24177 | | G][mG][fU][mA][fC][mU][fU][Ps][mG][Ps][fU][Ps |
| | | | | ][mU][Ps][fG][Ps][mU][Ps][mA] |
| | | | | [fA][G][fU][mA][fC][mC][fU][mU][fU][mA][fU][ |
| | | | | Ps][mA][Ps][fA][3xGalNac] |
| 1986 | 478 | 14178_ | C5-m-28 | [5Phos][mU][Ps][fG][Ps][mU][fA][mA][fA][mC][f |
| | | 24178 | | A][mG][fU][mU][fC][mC][fU][Ps][mU][Ps][fU][Ps |
| | | | | ][mC][Ps][fA][Ps][mA][Ps][mA] |
| | | | | [fG][mG][fA][mA][fC][mU][fG][mU][fU][mU][fA][ |
| | | | | Ps][mC][Ps][fA][3xGalNac] |
| 1987 | 479 | 14179_ | C5-m-29 | [5Phos][mU][Ps][fG][Ps][mU][fA][mA][fC][mU][f |
| | | 24179 | | U][mU][fG][mG][fC][mU][fG][Ps][mA][Ps][fG][P |
| | | | | s][mA][Ps][fG][Ps][mA][Ps][mC] |
| | | | | [fA][mG][fC][mC][fA][mA][fA][mG][fU][mU][fA][P |
| | | | | s][mC][Ps][fA][3xGalNac] |
| 1988 | 480 | 14180_ | C5-m-30 | [5Phos][mU][Ps][fA][Ps][mU][fA][mG][fU][mU][f |
| | | 24180 | | G][mU][fA][mA][fA][mC][fA][Ps][mG][Ps][fU][Ps |
| | | | | ][mU][Ps][fC][Ps][mC][Ps][mU] |
| | | | | [fG][mU][fU][mU][fA][mC][fA][mA][fC][mU][fA][P |
| | | | | s][mU][Ps][fA][3xGalNac] |
| 1989 | 481 | 14181_ | C5-m-31 | [5Phos][mU][Ps][fC][Ps][mA][fU][mA][fU][mU][f |
| | | 24181 | | C][mU][fU][mU][fA][mA][fC][Ps][mU][Ps][fU][Ps |
| | | | | [mC][Ps][fA][Ps][mA][Ps][mG] |
| | | | | [fU][mU][fA][mA][fA][mG][fA][mA][fU][mA][fU][P |
| | | | | s][mG][Ps][fA][3xGalNac] |
| 1990 | 482 | 14182_ | C5-m-32 | [5Phos][mU][Ps][fA][Ps][mG][fC][mA][fG][mU][f |
| | | 24182 | | C][mC][fU][mU][fU][mU][fA][Ps][mC][Ps][fA][Ps |
| | | | | ][mC][Ps][fU][Ps][mC][Ps][mU] |
| | | | | [fA][mA][fA][mA][fG][mG][fA][mC][fU][mG][fC][ |
| | | | | Ps][mU][Ps][fA][3xGalNac] |
| 1991 | 483 | 14183_ | C5-m-33 | [5Phos][mU][Ps][fA][Ps][mG][fU][mG][fA][mG][f |
| | | 24183 | | U][mU][fA][mU][fU][mU][fU][Ps][mG][Ps][fU][Ps |
| | | | | ][mC][Ps][fA][Ps][mA][Ps][mA] |
| | | | | [fA][mA][fA][mU][fA][mA][fC][mU][fC][mA][fC][P |
| | | | | s][mU][Ps][fA][3xGalNac] |
| 1992 | 484 | 14184_ | C5-m-34 | [5Phos][mU][Ps][fG][Ps][mG][fA][mA][fG][mA][f |
| | | 24184 | | C][mA][fU][mC][fU][mU][fU][Ps][mG][Ps][fA][Ps |
| | | | | ][mA][Ps][fC][Ps][mA][Ps][mA] |
| | | | | [fA][mA][fG][mA][fU][mG][fU][mC][fU][mU][fC][ |
| | | | | Ps][mC][Ps][fA][3xGalNac] |
| 1993 | 485 | 14185_ | C5-m-35 | [5Phos][mU][Ps][fC][Ps][mA][fG][mU][fC][mC][f |
| | | 24185 | | U][mU][fU][mU][fA][mC][fA][Ps][mC][Ps][fU][Ps |
| | | | | ][mC][Ps][fA][Ps][mA][Ps][mU] |
| | | | | [fG][mU][fA][mA][fA][mA][fG][mG][fA][mC][fU][ |
| | | | | Ps][mG][Ps][fA][3xGalNac] |
| 1994 | 486 | 14186_ | C5-m-36 | [5Phos][mU][Ps][fG][Ps][mU][fU][mA][fU][mU][f |
| | | 24186 | | U][mU][fG][mU][fC][mA][fA][Ps][mU][Ps][fA][Ps |
| | | | | ][mU][Ps][fA][Ps][mU][Ps][mU] |
| | | | | [fU][mG][fA][mC][fA][mA][fA][mA][fU][mA][fA][P |
| | | | | s][mC][Ps][fA][3xGalNac] |
| 1995 | 487 | 14187_ | C5-m-37 | [5Phos][mU][Ps][fU][Ps][mA][fC][mA][fA][mC][f |
| | | 24187 | | A][mG][fA][mA][fU][mA][fU][Ps][mG][Ps][fG][Ps |
| | | | | ][mU][Ps][fA][Ps][mU][Ps][mA] |
| | | | | [fU][mA][fU][mU][fC][mU][fG][mU][fU][mG][fU][ |
| | | | | Ps][mA][Ps][fA][3xGalNac] |
| 1996 | 488 | 14188_ | C5-m-38 | [5Phos][mU][Ps][fU][Ps][mU][fA][mU][fU][mU][f |
| | | 24188 | | U][mG][fU][mC][fA][mA][fU][Ps][mA][Ps][fU][Ps |
| | | | | ][mA][Ps][fU][Ps][mG][Ps][mA] |
| | | | | [fU][mU][fG][mA][fC][mA][fA][mA][fA][mU][fA][P |
| | | | | s][mA][Ps][fA][3xGalNac] |
| 1997 | 489 | 14189_ | C5-m-39 | [5Phos][mU][Ps][fA][Ps][mG][fG][mC][fU][mU][f |
| | | 24189 | | C][mA][fG][mG][fA][mA][fA][Ps][mA][Ps][fG][Ps |
| | | | | ][mA][Ps][fG][Ps][mG][Ps][mU] |
| | | | | [fU][mU][fC][mC][fU][mG][fA][mA][fG][mC][fC][ |
| | | | | Ps][mU][Ps][fA][3xGalNac] |
| 1998 | 490 | 14190_ | C5-m-40 | [5Phos][mU][Ps][fG][Ps][mG][fA][mA][fA][mA][f |
| | | 24190 | | G][mA][fG][mA][fU][mA][fA][Ps][mU][Ps][fU][Ps |
| | | | | ][mC][Ps][fC][Ps][mA][Ps][mU] |
| | | | | [fU][mA][fU][mC][fU][mC][fU][mU][fU][mU][fC][ |
| | | | | Ps][mC][Ps][fA][3xGalNac] |
| 1999 | 491 | 14191_ | C5-m-41 | [5Phos][mU][Ps][fG][Ps][mU][fU][mA][fC][mA][f |
| | | 24191 | | G][mC][fA][mA][fU][mA][fU][Ps][mA][Ps][fA][Ps] |
| | | | | [mA][Ps][fG][Ps][mG][Ps][mA] |
| | | | | [fU][mA][fU][mU][fG][mC][fU][mG][fU][mA][fA][ |
| | | | | Ps][mC][Ps][fA][3xGalNac] |
| 2000 | 492 | 14192_ | C5-m-42 | [5Phos][mU][Ps][fA][Ps][mU][fA][mA][fG][mC][f |
| | | 24192 | | A][mU][fA][mU][fG][mC][fA][Ps][mA][Ps][fU][Ps] |
| | | | | [mC][Ps][fU][Ps][mC][Ps][mU] |
| | | | | [fG][mC][fA][mU][fA][mU][fG][mC][fU][mU][fA][ |
| | | | | Ps][mU][Ps][fA][3xGalNac] |
| 2001 | 493 | 14193_ | C5-m-43 | [5Phos][mU][Ps][fA][Ps][mU][fA][mU][fU][mC][f |
| | | 24193 | | U][mU][fU][mA][fA][mC][fU][Ps][mU][Ps][fC][Ps |
| | | | | ][mA][Ps][fA][Ps][mA][Ps][mA] |
| | | | | [fG][mU][fU][mA][fA][mA][fG][mA][fA][mU][fA][P |
| | | | | s][mU][Ps][fA][3xGalNac] |
| 2002 | 494 | 14194_ | C5-m-44 | [5Phos][mU][Ps][fA][Ps][mG][fA][mC][fA][mU][f |
| | | 24194 | | C][mU][fU][mU][fG][mA][fA][Ps][mC][Ps][fA][Ps |
| | | | | ][mC][Ps][fC][Ps][mU][Ps][mU] |
| | | | | [fU][mC][fA][mA][fA][mG][fA][mU][fG][mU][fC][ |
| | | | | Ps][mU][Ps][fA][3xGalNac] |
| 2003 | 495 | 14195_ | C5-m-45 | [5Phos][mU][Ps][fC][Ps][mA][fG][mG][fA][mA][f |
| | | 24195 | | G][mA][fC][mA][fU][mC][fU][Ps][mU][Ps][fU][Ps |
| | | | | ][mG][Ps][fA][Ps][mA][Ps][mA] |
| | | | | [fG][mA][fU][mG][fU][mC][fU][mU][fC][mC][fU][ |
| | | | | Ps][mG][Ps][fA][3xGalNac] |
| 2004 | 496 | 14196_ | C5-m-46 | [5Phos][mU][Ps][fA][Ps][mC][fA][mG][fC][mA][f |
| | | 24196 | | A][mU][fA][mU][fA][mA][fA][Ps][mG][Ps][fG][Ps] |
| | | | | [mU][Ps][fA][Ps][mC][Ps][mU] |
| | | | | [fU][mU][fA][mU][fA][mU][fU][mG][fC][mU][fG][ |
| | | | | Ps][mU][Ps][fA][3xGalNac] |
| 2005 | 497 | 14197_ | C5-m-47 | [5Phos][mU][Ps][fA][Ps][mU][fU][mG][fU][mC][f |
| | | 24197 | | A][mU][fA][mG][fG][mU][fU][Ps][mA][Ps][fU][Ps |
| | | | | ][mU][Ps][fG][Ps][mG][Ps][mA] |
| | | | | [fA][mC][fC][mU][fA][mU][fG][mA][fC][mA][fA][P |
| | | | | s][mU][Ps][fA][3xGalNac] |
| 2006 | 498 | 14198_ | C5-m-48 | [5Phos][mU][Ps][fG][Ps][mA][fG][mU][fU][mA][f |
| | | 24198 | | U][mU][fU][mU][fG][mU][fC][Ps][mA][Ps][fA][Ps |
| | | | | ][mU][Ps][fA][Ps][mU][Ps][mG] |
| | | | | [fA][mC][fA][mA][fA][mA][fU][mA][fA][mC][fU][P |
| | | | | s][mC][Ps]fA][3xGalNac] |
| 2007 | 499 | 14199_ | C5-m-49 | [5Phos][mU][Ps][fG][Ps][mU][fG][mA][fG][mU][f |
| | | 24199 | | U][mA][fU][mU][fU][mU][fG][Ps][mU][Ps][fC][Ps |
| | | | | ][mA][Ps][fA][Ps][mU][Ps][mC] |
| | | | | [fA][mA][fA][mA][fU][mA][fA][mC][fU][mC][fA][P |
| | | | | s][mC][Ps][fA][3xGalNac] |
| 2008 | 500 | 14200_ | C5-m-50 | [5Phos][mU][Ps][fU][Ps][mG][fA][mG][fU][mU][f |
| | | 24200 | | A][mU][fU][mU][fU][mG][fU][Ps][mC][Ps][fA][Ps |
| | | | | ][mA][Ps][fU][Ps][mA][Ps][mA] |
| | | | | [fC][mA][fA][mA][fA][mU][fA][mA][fC][mU][fC][P |
| | | | | s][mA][Ps][fA][3xGalNac] |
| 2009 | 501 | 14201_ | C5-m-51 | [5Phos][mU][Ps][fA][Ps][mA][fU][mU][fU][mU][f |
| | | 24201 | | C][mC][fU][mU][fG][mA][fA][Ps][mA][Ps][fG][Ps |
| | | | | ][mA][Ps][fU][Ps][mC][Ps][mU] |
| | | | | [fU][mC][fA][mA][fG][mG][fA][mA][fA][mA][fU][P |
| | | | | s][mU][Ps][fA][3xGalNac] |
| 2010 | 502 | 14202_ | C5-m-52 | [5Phos][mU][Ps][fC][Ps][mU][fG][mU][fU][mA][f |
| | | 24202 | | C][mA][fG][mC][fA][mA][fU][Ps][mA][Ps][fU][Ps] |
| | | | | [mA][Ps][fA][Ps][mA][Ps][mA] |
| | | | | [fU][mU][fG][mC][fU][mG][fU][mA][fA][mC][fA][ |
| | | | | Ps][mG][Ps][fA][3xGalNac] |
| 2011 | 503 | 14203_ | C5-m-53 | [5Phos][mU][Ps][fA][Ps][mA][fU][mC][fC][mA][f |
| | | 24203 | | U][mU][fG][mU][fC][mA][fU][Ps][mA][Ps][fG][Ps |
| | | | | ][mG][Ps][fU][Ps][mU][Ps][mA] |
| | | | | [fU][mG][fA][mC][fA][mA][fU][mG][fG][mA][fU][ |
| | | | | Ps][mU][Ps][fA][3xGalNac] |
| 2012 | 504 | 14204_ | C5-m-54 | [5Phos][mU][Ps][fA][Ps][mU][fC][mC][fA][mU][f |
| | | 24204 | | U][mG][fU][mC][fA][mU][fA][Ps][mG][Ps][fG][Ps |
| | | | | ][mU][Ps][fU][Ps][mA][Ps][mU] |
| | | | | [fA][mU][fG][mA][fC][mA][fA][mU][fG][mG][fA][ |
| | | | | Ps][mU][Ps][fA][3xGalNac] |
| 2013 | 505 | 14205_ | C5-m-55 | [5Phos][mU][Ps][fA][Ps][mG][fA][mA][fA][mU][f |
| | | 24205 | | C][mC][fA][mU][fU][mG][fU][Ps][mC][Ps][fA][Ps |
| | | | | ][mU][Ps][fA][Ps][mG][Ps][mA] |
| | | | | [fC][mA][fA][mU][fG][mG][fA][mU][fU][mU][fC][ |
| | | | | Ps][mU][Ps][fA][3xGalNac] |
| 2014 | 506 | 14206_ | C5-m-56 | [5Phos][mU][Ps][fA][Ps][mG][fA][mC][fA][mU][f |
| | | 24206 | | A][mU][fU][mC][fU][mU][fU][Ps][mA][Ps][fA][Ps] |
| | | | | [mC][Ps][fU][Ps][mU][Ps][mA] |
| | | | | [fA][mA][fG][mA][fA][mU][fA][mU][fG][mU][fC][P |
| | | | | s][mU][Ps][fA][3xGalNac] |
| 2015 | 507 | 14207_ | C5-m-57 | [5Phos][mU][Ps][fA][Ps][mG][fU][mG][fC][mA][f |
| | | 24207 | | G][mA][fU][mU][fC][mC][fC][Ps][mU][Ps][fC][Ps |
| | | | | ][mC][Ps][fA][Ps][mC][Ps][mG] |
| | | | | [fG][mG][fA][mA][fU][mC][fU][mG][fC][mA][fC][ |
| | | | | Ps][mU][Ps][fA][3xGalNac] |
| 2016 | 508 | 14208_ | C5-m-58 | [5Phos][mU][Ps][fU][Ps][mC][fC][mA][fU][mU][f |
| | | 24208 | | G][mU][fC][mA][fU][mA][fG][Ps][mG][Ps][fU][Ps |
| | | | | ][mU][Ps][fA][Ps][mU][Ps][mC] |
| | | | | [fU][mA][fU][mG][fA][mC][fA][mA][fU][mG][fG][ |
| | | | | Ps][mA][Ps][fA][3xGalNac] |
| 2017 | 509 | 14209_ | C5-m-59 | [5Phos][mU][Ps][fG][Ps][mA][fC][mA][fU][mC][f |
| | | 24209 | | U][mU][fU][mG][fA][mA][fC][Ps][mA][Ps][fC][Ps |
| | | | | ][mC][Ps][fU][Ps][mU][Ps][mG] |
| | | | | [fU][mU][fC][mA][fA][mA][fG][mA][fU][mG][fU][ |
| | | | | Ps][mC][Ps][fA][3xGalNac] |
| 2018 | 510 | 14210_ | C5-m-60 | [5Phos][mU][Ps][fC][Ps][mA][fU][mU][fG][mU][f |
| | | 24210 | | C][mA][fU][mA][fG][mG][fU][Ps][mU][Ps][fA][Ps |
| | | | | ][mU][Ps][fU][Ps][mG][Ps][mA] |
| | | | | [fC][mC][fU][mA][fU][G][fA][mC][fA][mA][fU][P |
| | | | | s][mG][Ps][fA][3xGalNac] |
| 2019 | 511 | 14211_ | C5-m-61 | [5Phos][mU][Ps][fG][Ps][mA][fA][mG][fA][mG][f |
| | | 24211 | | A][mA][fA][mU][fC][mC][fA][Ps][mU][Ps][fU][Ps] |
| | | | | [mG][Ps][fU][Ps][mC][Ps][mA] |
| | | | | [fG][mG][fA][mU][fU][mU][fC][mU][fC][mU][fU][ |
| | | | | Ps][mC][Ps][fA][3xGalNac] |
| 2020 | 512 | 14212_ | C5-m-62 | [5Phos][mU][Ps][fA][Ps][mC][fA][mU][fA][mU][f |
| | | 24212 | | U][mC][fU][mU][fU][mA][fA][Ps][mC][Ps][fU][Ps |
| | | | | ][mU][Ps][fC][Ps][mA][Ps][mU] |
| | | | | [fU][mA][fA][mA][fG][mA][fA][mU][fA][mU][fG][P |
| | | | | s][mU][Ps][fA][3xGalNac] |
| 2021 | 513 | 14213_ | C5-m-63 | [5Phos][mU][Ps][fA][Ps][mG][fU][mC][fC][mU][f |
| | | 24213 | | U][mU][fU][mA][fC][mA][fC][Ps][mU][Ps][fC][Ps |
| | | | | ][mA][Ps][fA][Ps][mA][Ps][mG] |
| | | | | [fU][mG][fU][mA][fA][mA][fA][mG][fG][mA][C][ |
| | | | | Ps][mU][Ps][fA][3xGalNac] |
| 2022 | 514 | 14214_ | C5-m-64 | [5Phos][mU][Ps][fA][Ps][mU][fU][mU][fU][mC][f |
| | | 24214 | | C][mU][fU][mG][fA][mA][fA][Ps][mG][Ps][fA][Ps |
| | | | | ][mU][Ps][fC][Ps][mC][Ps][mU] |
| | | | | [fU][mU][fC][mA][fA][mG][fG][mA][fA][mA][fA][P |
| | | | | s][mU][Ps][fA][3xGalNac] |
| 2023 | 515 | 14215_ | C5-m-65 | [5Phos][mU][Ps][fG][Ps][mA][fA][mA][fU][mU][f |
| | | 24215 | | G][mU][fA][mU][fU][mU][fU][Ps][mA][Ps][fU][Ps |
| | | | | ][mC][Ps][fU][Ps][mG][Ps][mA] |
| | | | | [fA][mA][fA][mU][fA][mC][fA][mA][fU][mU][fU][P |
| | | | | s][mC][Ps][fA][3xGalNac] |
| 2024 | 516 | 14216_ | C5-m-66 | [5Phos][mU][Ps][fG][Ps][mU][fA][mA][fU][mU][f |
| | | 24216 | | U][mC][fA][mA][fA][mA][fU][Ps][mU][Ps][fC][Ps] |
| | | | | [mU][Ps][fU][Ps][mA][Ps][mA] |
| | | | | [fU][mU][fU][mU][fG][mA][fA][mA][fU][mU][fA][P |
| | | | | s][mC][Ps][fA][3xGalNac] |
| 2025 | 517 | 14217_ | C5-m-67 | [5Phos][mU][Ps][fA][Ps][mA][fA][mA][fU][mU][f |
| | | 24217 | | C][mU][fU][mA][fA][mA][fG][Ps][mU][Ps][fU][Ps |
| | | | | ][mC][Ps][fU][Ps][mU][Ps][mC] |
| | | | | [fU][mU][fU][mA][fA][mG][fA][mA][fU][mU][fU][P |
| | | | | s][mU][Ps][fA][3xGalNac] |
| 2026 | 518 | 14218_ | C5-m-68 | [5Phos][mU][Ps][fG][Ps][mA][fA][mU][fU][mU][f |
| | | 24218 | | U][mG][fG][mU][fU][mC][fU][Ps][mG][Ps][fC][P |
| | | | | s][mU][Ps][fC][Ps][mU][Ps][mA] |
| | | | | [fG][mA][fA][mC][fC][mA][fA][mA][fA][mU][fU][P |
| | | | | s][mC][Ps][fA][3xGalNac] |
| 2027 | 519 | 14219_ | C5-m-69 | [5Phos][mU][Ps][fG][Ps][mU][fC][mA][fU][mU][f |
| | | 24219 | | U][mU][fA][mU][fA][mA][fU][Ps][mU][Ps][fA][Ps] |
| | | | | [mU][Ps][fG][Ps][mU][Ps][mA] |
| | | | | [fU][mU][fA][mU][fA][mA][fA][mA][fU][mG][fA][P |
| | | | | s][mC][Ps][fA]3xGalNac] |
| 2028 | 520 | 14220_ | C5-m-70 | [5Phos][mU][Ps][fC][Ps][mA][fA][mA][fU][mC][f |
| | | 24220 | | C][mU][fG][mU][fA][mC][fU][Ps][mG][Ps][fA][Ps |
| | | | | ][mC][Ps][fA][Ps][mA][Ps][mA] |
| | | | | [fG][mU][fA][mC][fA][mG][fG][mA][fU][mU][fU][ |
| | | | | Ps][mG][Ps][fA][3xGalNac] |
| 2029 | 521 | 14221_ | C5-m-71 | [5Phos][mU][Ps][fG][Ps][mA][fU][mA][fA][mC][f |
| | | 24221 | | U][mU][fU][mU][fA][mA][fU][Ps][mA][Ps][fG][Ps |
| | | | | ][mA][Ps][fG][Ps][mA][Ps][mA] |
| | | | | [fU][mU][fA][mA][fA][mA][fG][mU][fU][mA][fU][P |
| | | | | s][mC][Ps][A]\|3xGalNac] |
| 2030 | 522 | 14222_ | C5-m-72 | [5Phos][mU][Ps][fU][Ps][mU][fA][mA][fG][mU][f |
| | | 24222 | | C][mU][fU][mC][fU][mC][fU][Ps][mU][Ps][fA][Ps |
| | | | | ][mU][Ps][fU][Ps][mC][Ps][mA] |
| | | | | [fG][mA][fG][mA][fA][mG][fA][mC][fU][mU][fA][ |
| | | | | Ps][mA][Ps][A][3xGalNac] |
| 2031 | 523 | 14223_ | C5-m-73 | [5Phos][mU][Ps][fA][Ps][mU][fA][mA][fU][mU][f |
| | | 24223 | | C][mC][fA][mA][fU][mA][fU][Ps][mG][Ps][fA][Ps] |
| | | | | [mU][Ps][fC][Ps][mA][Ps][mA] |
| | | | | [fU][mA][fU][mU][fG][mG][fA][mA][fU][mU][fA][ |
| | | | | Ps][mU][Ps][fA][3xGalNac] |
| 2032 | 524 | 14224_ | C5-m-74 | [5Phos][mU][Ps][fG][Ps][mA][fU][mA][fA][mA][f |
| | | 24224 | | U][mG][fA][mA][fC][mA][fU][Ps][mG][Ps][fG][Ps |
| | | | | ][mC][Ps][fC][Ps][mU][Ps][mA] |
| | | | | [fU][mG][fU][mU][fC][mA][fU][mU][fU][mA][fU][ |
| | | | | Ps][mC][Ps][fA][3xGalNac] |
| 2033 | 525 | 14225_ | C5-m-75 | [5Phos][mU][Ps][fA][Ps][mA][fG][mG][fU][mU][f |
| | | 24225 | | C][mA][fU][mC][fA][mU][fU][Ps][mU][Ps][fU][Ps |
| | | | | ][mC][Ps][fU][Ps][mU][Ps][mA] |
| | | | | [fA][mU][fG][mA][fU][mG][fA][mA][fC][mC][fU][ |
| | | | | Ps][mU][Ps][fA][3xGalNac] |
| 2034 | 526 | 14226_ | C5-m-76 | [5Phos][mU][Ps][fG][Ps][mG][fA][mA][fG][mU][f |
| | | 24226 | | G][mC][fU][mA][fU][mA][fA][Ps][mA][Ps][fA][Ps] |
| | | | | [mC][Ps][fA][Ps][mU][Ps][mU] |
| | | | | [fU][mA][fU][mA][fG][mC][fA][mC][fU][mU][fC][ |
| | | | | Ps][mC][Ps][fA][3xGalNac] |
| 2035 | 527 | 14227_ | C5-m-77 | [5Phos][mU][Ps][fC][Ps][mA][fA][mG][fU][mA][f |
| | | 24227 | | C][mU][fC][mU][fU][mA][fA][Ps][mA][Ps][fG][Ps |
| | | | | ][mC][Ps][fA][Ps][mA][Ps][mU] |
| | | | | [fU][mA][fA][mG][fA][mG][fU][mA][fC][mU][fU][ |
| | | | | Ps][mG][Ps][fA][3xGalNac] |
| 2036 | 528 | 14228_ | C5-m-78 | [5Phos][mU][Ps][fC][Ps][mC][fA][mA][fU][mG][f |
| | | 24228 | | A][mU][fU][mU][fC][mC][fU][Ps][mG][Ps][fU][Ps |
| | | | | ][mU][Ps][fU][Ps][mC][Ps][mA] |
| | | | | [fG][mG][fA][mA][fA][mU][fC][mA][fU][mU][fG][ |
| | | | | Ps][mG][Ps][fA][3xGalNac] |
| 2037 | 529 | 14229_ | C5-m-79 | [5Phos][mU][Ps][fA][Ps][mU][fG][G][fU][mA][f |
| | | 24229 | | U][mA][fU][mU][fC][mA][fU][Ps][mU][Ps][fU][Ps |
| | | | | ][mC][Ps][fC][Ps][mA][Ps][mA] |
| | | | | [fU][mG][fA][mA][fU][mA][fU][mA][fC][mC][fA][P |
| | | | | s][mU][Ps][fA][3xGalNac] |
| 2038 | 530 | 14230_ | C5-m-80 | [5Phos][mU][Ps][fA][Ps][mA][fC][mA][fA][mG][f |
| | | 24230 | | A][mU][fG][mA][fA][mC][fU][Ps][mU][Ps][fC][Ps |
| | | | | ][mC][Ps][fC][Ps][mA][Ps][mA] |
| | | | | [fG][mU][fU][mC][fA][mU][fC][mU][fU][mG][fU][ |
| | | | | Ps][mU][Ps][fA][3xGalNac] |
| 2039 | 531 | 14231_ | C5-m-81 | [5Phos][mU][Ps][fG][Ps][mA][fA][mC][fU][mU][f |
| | | 24231 | | C][mA][fG][mG][fA][mA][fU][Ps][mU][Ps][fU][Ps |
| | | | | ][mU][Ps][fA][Ps][mG][Ps][mA] |
| | | | | [fU][mU][fC][mC][fU][mG][fA][mA][G][mU][fU][ |
| | | | | Ps][mC][Ps][fA][3xGalNac] |
| 2040 | 532 | 14232_ | C5-m-82 | [5Phos][mU][Ps][fA][Ps][mG][fU][mC][fU][mU][f |
| | | 24232 | | C][mU][fC][mU][fU][mA][fU][Ps][mU][Ps][fC][Ps |
| | | | | ][mC][Ps][fA][Ps][mA][Ps][mA] |
| | | | | [fU][mA][fA][mG][fA][mG][fA][mA][fG][mA][fC][P |
| | | | | s][mU][Ps][fA][3xGalNac] |
| 2041 | 533 | 14233_ | C5-m-83 | [5Phos][mU][Ps][fA][Ps][mA][fU][mG][fU][mU][f |
| | | 24233 | | U][mA][fU][mA][fC][mU][fU][Ps][mU][Ps][fG][Ps |
| | | | | ][mA][Ps][fU][Ps][mA][Ps][mA] |
| | | | | [fA][mG][fU][mA][fU][mA][fA][mA][fC][mA][fU][P |
| | | | | s][mU][Ps][fA][3xGalNac] |
| 2042 | 534 | 14234_ | C5-m-84 | [5Phos][mU][Ps][fC][Ps][mG][fG][mA][fA][mU][f |
| | | 24234 | | C][mG][fU][mA][fC][mA][fC][Ps][mA][Ps][fA][Ps] |
| | | | | [mA][Ps][fG][Ps][mG][Ps][mG] |
| | | | | [fU][mG][fU][mA][fC][mG][fA][mU][fU][mC][fC][ |
| | | | | Ps][mG][Ps][fA][3xGalNac] |
| 2043 | 535 | 14235_ | C5-m-85 | [5Phos][mU][Ps][fA][Ps][mU][fA][mC][fC][mU][f |
| | | 24235 | | C][mU][fG][mC][fU][mC][fU][Ps][mU][Ps][fC][Ps |
| | | | | ][mU][Ps][fG][Ps][mA][Ps][mA] |
| | | | | [fG][mA][fG][mC][fA][mG][fA][mG][fG][mU][fA][ |
| | | | | Ps][mU][Ps][fA][3xGalNac] |
| 2044 | 536 | 14236_ | C5-m-86 | [5Phos][mU][Ps][fA][Ps][mU][fC][mA][fA][mU][f |
| | | 24236 | | U][mU][fC][mU][fU][mC][fU][Ps][mA][Ps][fC][Ps |
| | | | | ][mC][Ps][fA][Ps][mU][Ps][mA] |
| | | | | [fG][mA][fA][mG][fA][mA][fA][mU][fU][mG][fA][P |
| | | | | s][mU][Ps][fA][3xGalNac] |
| 2045 | 537 | 14237_ | C5-m-87 | [5Phos][mU][Ps][fA][Ps][mA][fC][mA][fU][mU][f |
| | | 24237 | | G][mU][fG][mU][fU][mU][fU][Ps][mG][Ps][fC][P |
| | | | | s][mA][Ps][fU][Ps][mU][Ps][mA] |
| | | | | [fA][mA][fA][mC][fA][mC][fA][mA][fU][mG][fU][P |
| | | | | s][mU][Ps][fA][3xGalNac] |
| 2046 | 538 | 14238_ | C5-m-88 | [5Phos][mU][Ps][fA][Ps][mA][fC][mU][fU][mU][f |
| | | 24238 | | A][mU][fA][mA][fG][mC][fA][Ps][mU][Ps][fA][Ps] |
| | | | | [mU][Ps][fG][Ps][mC][Ps][mU] |
| | | | | [fG][mC][fU][mU][fA][mU][fA][mA][fA][mG][fU][ |
| | | | | Ps][mU][Ps][fA][3xGalNac] |
| 2047 | 539 | 14239_ | C5-m-89 | [5Phos][mU][Ps][fA][Ps][mG][fG][mA][fU][mA][f |
| | | 24239 | | A][mC][fU][mU][fU][mU][fA][Ps][mA][Ps][fU][Ps] |
| | | | | [mA][Ps][fG][Ps][mA][Ps][mU] |
| | | | | [fA][mA][fA][mA][fG][mU][fU][mA][fU][mC][fC][P |
| | | | | s][mU][Ps][fA][3xGalNac] |
| 2048 | 540 | 14240_ | C5-m-90 | [5Phos][mU][Ps][fU][Ps][mU][fU][mA][fU][mU][f |
| | | 24240 | | G][mG][fU][mU][fG][mA][fU][Ps][mA][Ps][fC][Ps |
| | | | | ][mU][Ps][fG][Ps][mU][Ps][mA] |
| | | | | [fU][mC][fA][mA][fC][mC][fA][mA][fU][mA][fA][P |
| | | | | s][mA][Ps][fA]3xGalNac] |
| 2049 | 541 | 14241_ | C5-m-91 | [5Phos][mU][Ps][fG][Ps][mC][fA][mA][fC][mU][f |
| | | 24241 | | G][mU][fU][mU][fU][mC][fU][Ps][mU][Ps][fC][Ps |
| | | | | [mU][Ps][fG][Ps][mG][Ps][mA] |
| | | | | [fG][mA][fA][mA][fA][mC][fA][mG][fU][mU][fG][ |
| | | | | Ps][mC][Ps][fA]3xGalNac] |
| 2050 | 542 | 14242_ | C5-m-92 | [5Phos][mU][Ps][fG][Ps][mC][fU][mU][fU][mG][f |
| | | 24242 | | A][mU][fA][mC][fA][mA][fC][Ps][mU][Ps][fU][Ps] |
| | | | | [mC][Ps][fC][Ps][mA][Ps][mG] |
| | | | | [fU][mU][fG][mU][fA][mU][fC][mA][fA][mA][fG][ |
| | | | | Ps][mC][Ps][fA][3xGalNac] |
| 2051 | 543 | 14243_ | C5-m-93 | [5Phos][mU][Ps][fC][Ps][mA][fA][mA][fG][mC][f |
| | | 24243 | | U][mU][fC][mU][fC][mU][fC][Ps][mU][Ps][fU][Ps |
| | | | | ][mC][Ps][fA][Ps][mA][Ps][mG] |
| | | | | [fA][mG][fA][mG][fA][mA][fG][mC][fU][mU][fU][ |
| | | | | Ps][mG][Ps][fA][3xGalNac] |
| 2052 | 544 | 14244_ | C5-m-94 | [5Phos][mU][Ps][fG][Ps][mG][fA][mA][fC][mU][f |
| | | 24244 | | C][mC][fU][mU][fU][mC][fG][Ps][mU][Ps][fC][Ps |
| | | | | ][mU][Ps][fG][Ps][mC][Ps][mC] |
| | | | | [fG][mA][fA][mA][fG][mG][fA][mG][fU][mU][fC][ |
| | | | | Ps][mC][Ps][fA]3xGalNac] |
| 2053 | 545 | 14245_ | C5-m-95 | [5Phos][mU][Ps][fA][Ps][mU][fG][mA][fC][mA][f |
| | | 24245 | | G][mU][fU][mC][fU][mU][fU][Ps][mG][Ps][fA][Ps |
| | | | | ][mC][Ps][fU][Ps][mG][Ps][mA] |
| | | | | [fA][mA][fG][mA][fA][mC][fU][mG][fU][mC][fA][P |
| | | | | s][mU][Ps][A][3xGalNac] |
| 2054 | 546 | 14246_ | C5-m-96 | [5Phos][mU][Ps][fU][Ps][mG][fC][mA][fG][mA][f |
| | | 24246 | | A][mU][fA][mA][fC][mA][fU][Ps][mG][Ps][fU][Ps] |
| | | | | [mC][Ps][fC][Ps][mA][Ps][mA] |
| | | | | [fU][mG][fU][mU][fA][mU][fU][mC][fU][mG][fC][ |
| | | | | Ps][mA][Ps]\|fA][3xGalNac] |
| 2055 | 547 | 14247_ | C5-m-97 | [5Phos][mU][Ps][fA][Ps][mG][fA][mA][fG][mU][f |
| | | 24247 | | C][mC][fU][mA][fU][mA][fG][Ps][mU][Ps][fU][Ps |
| | | | | ][mG][Ps][fU][Ps][mA][Ps][mC] |
| | | | | [fU][mA][fU][mA][fG][mG][fA][mC][fU][mU][fC][ |
| | | | | Ps][mU][Ps][fA][3xGalNac] |
| 2056 | 548 | 14248_ | C5-m-98 | [5Phos][mU][Ps][fA][Ps][mU][fA][mA][fC][mU][f |
| | | 24248 | | U][mU][fU][mA][fA][mU][fA][Ps][mG][Ps][fA][Ps] |
| | | | | [mG][Ps][fA][Ps][mU][Ps][mU] |
| | | | | [fA][mU][fU][mA][fA][mA][fA][mG][fU][mU][fA][P |
| | | | | s][mU][Ps][fA][3xGalNac] |
| 2057 | 549 | 14249_ | C5-m-99 | [5Phos][mU][Ps][fC][Ps][mU][fA][mA][fG][mA][f |
| | | 24249 | | U][mU][fU][mC][fU][mU][fU][Ps][mU][Ps][fC][Ps |
| | | | | ][mC][Ps][fA][Ps][mA][Ps][mA] |
| | | | | [fA][mA][fG][mA][fA][mA][fU][mC][fU][mU][fA][P |
| | | | | s][mG][Ps][fA]\|3xGalNac] |
| 2058 | 550 | 14250_ | C5-m- | [5Phos][mU][Ps][fA][Ps][mU][fA][mA][fA][mU][f |
| | | 24250 | 100 | G][mA][fA][mC][fA][mU][fG][Ps][mG][Ps][C][Ps |
| | | | | ][mC][Ps][fU][Ps][mG][Ps][mC] |
| | | | | [fA][mU][fG][mU][fU][mC][fA][mU][fU][mU][fA][ |
| | | | | Ps][mU][Ps][fA][3xGalNac] |

Note =
The first nucleobase on the terminal 5' position (the sequences in the table are presented from a 5′(left) to a 3′(right direction) can be freely selected from U, A, G and C instead of the nucleobase disclosed in the table. Each of the above constructs may or may not have a phosphate modification at the 5′ end group.

TABLE 4a
Unmodified CFB-C5 muRNA constructs

| SEQ | Construct | Unmodified Combination |
|---|---|---|
| ID No. | ID No. | CFB-C5 muRNA Sequences |
| 2059 | B106-C5-30 | UUGAAUGAAACGACUUCUCCUG |
| | | UUUACAACUAUC |
| 2060 | | GAUAGUUGUAAACAGUUCCAGU |
| | | CGUUUCAUUCAA |
| 2061 | B106-C5-37 | UUGAAUGAAACGACUUCUCCAU |
| | | AUUCUGUUGUAA |
| 2062 | | UUACAACAGAAUAUGGUAUAGU |
| | | CGUUUCAUUCAA |
| 2063 | B13-C5-30 | UUGCCACAGACUCAGAGAGCUG |
| | | UUUACAACUAUC |
| 2064 | | GAUAGUUGUAAACAGUUCCCUG |
| | | AGUCUGUGGCAA |
| 2065 | B13-C5-37 | UUGCCACAGACUCAGAGAGCAU |
| | | AUUCUGUUGUAA |
| 2066 | | UUACAACAGAAUAUGGUAUCUG |
| | | AGUCUGUGGCAA |

Note =
The first nucleobase on the terminal 5′ position (the sequences in the table are presented from a 5′ (left) to a 3′ (right direction) can be freely selected from U, A, G and C instead of the nucleobase disclosed in the table).

TABLE 4b
Modified CFB-C5 muRNA constructs

Construct ID B106-C5-30
SEQ ID NO: 2067:
5′[phos] mU# fU# mG fA mA fu mG fA mA fA mC fG
mA fC mU# fU# mC# fU# rC fC# mU# fG mU fU mU fA
mC fA mA fC mU mA# mU# mC# [3XGalNAC]
SEQ ID NO: 2068
5′[phos] mG# fA# mU fA mG fU mU fG mU fA mA fA
mC fA mG# fU# fU# fC# rC fA# mG# fU mC fG mU fU
mU fC mA fU mU mC# mA# mA# [3-GalNac]
Construct ID B106-C5--37
SEQ ID NO: 2069:
5′[phos] mU# fU# mG fA mA fu mG fA mA fA mC fG
mA fC mU# fU# mC# fU# rC fC# mA# fU mA fU mU fC
mU fG mU fU mG mU# mA# mA# 3GalNAc
SEQ ID NO: 2070:
5′[phos] mU# fU# mA fC mA fA mC fA mG fA mA fU
mA fU mG# fG# mU# fA# rU fA# mG# fU mC fG mU fU
mU fC mA fU mU mC# mA# mA# [3-GalNac]
Construct ID B13-C5--30
SEQ ID NO: 2071:
5′[phos] mU# fU# mG fC mC fA mC fA mG fA mC fU
mC fA mG fA# mG# mA# rG fC# mU# fG mU fU mU fA
mC fA mA fC mU mA# mU# mC# 3GalNAc
SEQ ID NO: 2072:
5′[phos] mG# fA# mU fA mG fU mU fG mU fA mA fA
mC fA mG# fU# fU# fC# rC fC mU fG mA fG mU fC
mU fG mU fG mG mC# mA# mA# [3-GalNac]
Construct ID B13-C5-37
SEQ ID NO: 2073:
5′[phos] mU# fU# mG fC mC fA mC fA mG fA mC fU
mC fA mG fA# mG# mA# rG fC# mA# fU mA fU mU fC
mU fG mU fU mG mU# mA# mA# 3GalNAc
SEQ ID NO: 2074:
5′[phos] mU# fU# mA fC mA fA mC fA mG fA mA fU
mA fU mG# fG# mU# fA# rU fC mU fG mA fG mU fC
mU fG mU fG mG mC# mA# mA# [3-GalNac]
Note =
The first nucleobase on the terminal 5′ position (the sequences in the table are presented from a 5′ (left) to a 3′ (right direction) can be freely selected from U, A, G and C instead of the nucleobase disclosed in the table). Each of the above constructs may or may not have a phosphate modification at the 5′ end group.

[0323] Specific notes about the nomenclature in Tables 3a to 4b:
[0324] fN: 2′-Fluoro residues
[0325] rN unmodified nucleotide
[0326] mN: 2′-O-methyl residues
[0327] Ps or #: phosphorothioate
[0328] p, Phos: phosphate
[0329] (GalNAc): Sirnaomics mono-GalNAc building block

[0330] It should also be noted that the scope of the disclosed embodiments extends to sequences that correspond to those in the Tables above, and where the 5′ terminal nucleoside of the antisense (guide) strand (first region as defined in the claims herein) can include any nucleobase that can be present in an RNA molecule, in other words can be any of adenine (A), uracil (U), guanine (G) or cytosine (C). Additionally, the scope of the disclosed embodiments extends to sequences that correspond to those in the Tables above, and where the 3′ terminal nucleoside of the sense (passenger) strand (second region as defined in the claims herein) can include any nucleobase that can be present in an RNA molecule, in other words can be any of adenine (A), uracil (U), guanine (G) or cytosine (C), advantageously however a nucleobase that is complementary to the 5′ nucleobase of the antisense (guide) strand (first region as defined in the claims herein).

[0331] While the methods are shown and described as being a series of acts that are performed in a particular sequence, it is to be understood and appreciated that the methods are not limited by the order of the sequence. For example, some acts can occur in a different order than what is described herein. In addition, an act can occur concurrently with another act. Further, in some instances, not all acts may be required to implement a method described herein.

[0332] The order of the steps of the methods described herein is exemplary, but the steps may be carried out in any suitable order, or simultaneously where appropriate. Additionally, steps may be added or substituted in, or individual steps may be deleted from any of the methods without departing from the scope of the subject matter described herein. Aspects of any of the examples described above may be combined with aspects of any of the other examples described to form yet additional examples.

[0333] It will be understood that the above description of a advantageous embodiment is given by way of example only and that various modifications may be made by those skilled in the art. What has been described above includes examples of one or more embodiments. It is, of course, not possible to describe every conceivable modification and alteration of the above compounds, compositions or methods for purposes of describing the aforementioned aspects, but one of ordinary skill in the art can recognize that many further modifications and permutations of various aspects are possible. Accordingly, the described aspects are intended to embrace all such alterations, modifications, and variations that fall within the scope of the appended claims.

### EXAMPLES

[0334] The following examples illustrate certain embodiments of the present disclosure and are not limiting. Moreover, where specific embodiments are provided, the inventors have contemplated generic application of those specific embodiments. For example, disclosure of an oligonucleotide having a particular motif or modification patterns provides reasonable support for additional oligonucleotides having the same or similar motif or modification patterns.

[0335] The syntheses of the RNAi constructs according to the disclosed embodiments and disclosed herein have been carried out using synthesis methods known to the person skilled in the art, such as synthesis methods disclosed in https://en.wikipedia.org/wiki/Oligonucleotide_synthesis {retrieved on 16 Feb. 2022}, where the methods disclosed on this website are incorporated by reference herein in their entirety. The only difference to the synthesis method disclosed in this reference is that GalNAc phosphoramidite immobilized on a support is used in the synthesis method during the first synthesis step.

### Example 1

### Materials and Methods

### Cell Culture:

[0336] HepG2 (ATCC cat. 85011430) cells were maintained by biweekly passing in EMEM supplemented with 10% FBS, 20 mM L-glutamine, 10 mM HEPES pH 7.2, 1 mM sodium pyruvate, 1×MEM non-essential amino acids, and 1× Pen/Strep (EMEM complete).

### CFB Target Identification and Duplex Preparation:

[0337] Oligomeric compounds targeting CFB were identified by bioinformatic analysis on human CFB mRNA sequence as given in RefSeq sequence ID NM_001710.5. 250 compounds were selected for synthesis as asymmetric duplexes. Compounds were dissolved to 50 uM in molecular biology grade water and annealed by heating at 95° C. for 5 minutes followed by gradual cooling to room temperature.

### CFB—Primary Screen:

[0338] On the day of transfection, HepG2 cells were collected by trypsinization, counted, and seeded in 96 well tissue culture treated plates at 10,000 cells per well in 50 uL complete EMEM with 20% FBS. Cells were allowed to rest for 4 hours before transfection with 2 pmoles of each respective CFB-targeting oligomeric compound in triplicate via RNAiMax (ThermoFisher). In brief, 8 pmoles of each compound were diluted in 100 uL OptiMEM and mixed gently with 0.8 uL of RNAiMax in 100 uL OptiMEM to make 200 uL total complex. 50 uL of each RNAiMax complexed compound was added to each respective triplicate well of HepG2 cells for a final mixture of 20 nM compound in a volume of 100 uL, 50/50 EMEM/OptiMEM at 10% FBS.

[0339] 72 hours post transfection, cells were harvested and RNA isolated using the PureLink Pro 96 total RNA Purification Kit (ThermoFisher, 12173011A) according to the manufacturer protocol. Harvested RNA was assayed for CFB expression via Taqman qPCR using the Luna Universal Probe One-Step RT-qPCR Kit (NEB, E3006). Two separate qPCR assays were performed for each sample using two separate CFB Taqman probe sets multiplexed with a common GAPDH VIC probe (ThermoFisher, 4326317E). Thermocycling and data acquisition was performed with an Applied Biosystems QuantStudio 3 Real-Time PCR System.

### CFB—Secondary Screen:

[0340] Based on data from the primary screen, a yet narrower set of the best performing 30 CFB-targeting constructs were tested in dose curves. As before, HepG2 cells were collected by trypsinization and seeded in 96 well tissue culture plates at 10,000 cells per well in 50 uL complete EMEM with 20% FBS and allowed to rest for 4 hours. Transfection complexes were formed by gently mixing 36 pmoles of each compound in 180 uL OptiMEM with 2.16 uL RNAiMax in 180 uL OptiMEM to make 360 uL total complex. A two fold dilution series was then performed with basal OptiMEM. 50 uL of each dilution was added to respective triplicates of HepG2 cells to make a final dilution series of 50 nM down to 0.32 nM in a volume of 100 uL, 50/50 EMEM/OptiMEM at 10% FBS.

[0341] 72 hours post transfection, cells were harvested and RNA isolated using the PureLink Pro 96 total RNA Purification Kit (ThermoFisher, 12173011A) according to the manufacturer protocol. Harvested RNA was assayed for CFB expression via Taqman qPCR using the Luna Universal Probe One-Step RT-qPCR Kit (NEB, E3006). A single qPCR assay was performed for each sample using CFB Taqman probe set multiplexed with a common GAPDH VIC probe (ThermoFisher, 4326317E). Thermocycling and data acquisition was performed with an Applied Biosystems QuantStudio 3 Real-Time PCR System.

### Example 2

### Results

[0342] Table 5 below shows CFB IC50 values (in nM) for 30 advantageous constructs selected in accordance with the examples. Max % KD indicates the maximally achieved knock-down with 0% being no knock-down and 100% full knock-down.

| SEQ ID No. | Construct ID | IC₅₀ | Max % KD |
|---|---|---|---|
| 94 and 346 | CFB94 | 4.36 | 83 |
| 247 and 499 | CFB247 | 4.42 | 84 |
| 13 and 265 | CFB13 | 5.72 | 93 |
| 106 and 358 | CFB106 | 5.84 | 88 |
| 28 and 280 | CFB28 | 6.24 | 84 |
| 135 and 387 | CFB135 | 6.91 | 89 |
| 132 and 384 | CFB132 | 6.92 | 87 |
| 32 and 284 | CFB32 | 6.96 | 81 |
| 83 and 335 | CFB83 | 7.17 | 88 |
| 102 and 354 | CFB102 | 7.39 | 83 |
| 62 and 314 | CFB62 | 7.61 | 90 |
| 241 and 493 | CFB241 | 7.84 | 82 |
| 9 and 261 | CFB09 | 8.02 | 92 |
| 54 and 306 | CFB54 | 8.24 | 82 |
| 143 and 395 | CFB143 | 8.81 | 82 |
| 103 and 355 | CFB103 | 9.16 | 80 |
| 128 and 380 | CFB128 | 9.22 | 83 |
| 53 and 305 | CFB53 | 9.52 | 83 |
| 150 and 402 | CFB150 | 10.33 | 83 |
| 82 and 334 | CFB82 | 10.34 | 88 |
| 36 and 288 | CFB36 | 10.64 | 79 |
| 25 and 277 | CFB25 | 10.88 | 81 |
| 71 and 323 | CFB71 | 11.47 | 84 |
| 17 and 269 | CFB17 | 11.60 | 77 |
| 5 and 257 | CFB05 | 12.67 | 75 |
| 141 and 393 | CFB141 | 13.37 | 77 |
| 90 and 342 | CFB90 | 13.78 | 85 |
| 127 and 379 | CFB127 | 14.04 | 73 |
| 75 and 327 | CFB75 | 16.45 | 69 |
| 95 and 347 | CFB95 | 19.25 | 72 |

[0343] The IC₅₀ data in the single- to low double-digit nanomolar range demonstrate outstanding performance of numerous constructs of the disclosed embodiments.

### Example 3

### Materials and Methods

### Cell Culture:

[0344] Human primary hepatocytes (5 donor pooled—Sekisui XenoTech, HPCH05+) were thawed immediately prior to experimentation and cultured in 1× complete Williams medium (Gibco, A1217601) supplemented with Hepatocytes plating supplement pack (Gibco, CM3000). FEBS concentration was modified from manufacture recipe to a final 2.5% (as opposed to 5%) for compound stability.

[0345] 1× Complete WEM: 2.5% FEBS, 1 NM Dexamethasone, Pen/Strep (100 U/mL/100 Ng/mL), 4 μg/ml Human Insulin, 2 mM GlutaMAX, 15 mM HEPES, pH 7.4.

[0346] Hepatocytes were plated on Collagen I (rat tail) coated 96 well tissue culture plates (Gibco, A1142803).

### CFB Compound Preparation:

[0347] Compounds were dissolved to 200 μM in water and annealed by heating at 95° C. for 5 minutes followed by rapid cooling on ice.

### CFB Compound Transfections:

[0348] On the day of transfection, primary human hepatocytes were thawed in 45 mL of human OptiThaw (Sekisui XenoTech, K8000) and centrifuged down at 200 g for 5 minutes. Cells were resuspended in 2× complete WEM and counted. Cell were then plated in 50 μL of 2× complete WEM at 25,000 cells per well on 96 well type 1 rat tail Collagen plates and allowed to rest and attach for four hours before transfection.

[0349] Compounds were diluted further to 2 μM in basal WEM. A seven step, fivefold dilution series was prepared in basal WEM from 2 μM to 0.000128 μM. 50 μL of each dilution was added to respective triplicates of the plated hepatocytes for a final dilution series of 1 μM down to 0.000064 μM in a volume of 100 uL 1× complete WEM.

[0350] 72 hours post transfection, cells were harvested and RNA isolated using the PureLink Pro 96 total RNA Purification Kit (ThermoFisher, 12173011A) according to the manufacturer protocol. Harvested RNA was assayed for CFB expression via TaqMan qPCR using the Luna Universal Probe One-Step RT-qPCR Kit (NEB, E3006). A single qPCR assay was performed for each sample using an CFB TaqMan probe set (Hs01011282_g1-FAM) multiplexed with a common GAPDH VIC probe (ThermoFisher, 4326317E). Thermocycling and data acquisition was performed with an Applied Biosystems QuantStudio 3/5 Real-Time PCR System.

### Results

[0351] The results of the in vitro studies are shown in FIG. 1.

### Example 4

[0352] Pharmacodynamics Study of STP144G (constructs 13(5) and 106-13(4), SEQ ID Nos. 1757-1758 in Table 3b) Following Single/Repeat Subcutaneous Injection to Non-Naïve Cynomolgus Monkeys.

### Study Protocol

[0353] The following study protocol has been drafted before the animal experiments and studies have been completed and therefore uses the future tense. However, as the study has already been completely carried out, each usage of “future tense” shall be considered as the “past tense” in the following description of the study protocol.

TABLE 6
Study Design

| | | | | | TOTAL | Target | |
|---|---|---|---|---|---|---|---|
| | | | | Target | Target Dose | Dose | |
| | | CFB Test | SEQ | Dose Level | Volume | Concentration | Dose |
| Group | # of Males | Article | ID No. | (mg/animal) | (mL) | (mg/mL) | Route |
| 1 | 4 non- | saline | — | — | 3.0 mL | — | SC |
| | naïve | | | | | | |
| 2 | 4 non- | STP144G(106- | 1758 | 2.5 (Target | 3.0 mL | 1 | SC |
| | naïve | 13(4)) | | as 1 mg/kg) | | | |
| 3 | 4 non- | STP144G | 1758 | 7.5 (Target | 3.0 mL | 3 | SC |
| | naïve | (106-13(4)) | | as 3 mg/kg) | | | |
| 4 | 4 non- | STP144G | 1758 | 25 (Target | 3.0 mL | 10 | SC |
| | naïve | (106-13(4)) | | as 10 mg/kg) | | | |
| 5 | 4 non- | STP144G | 1758 | 7.5 (Target | 3.0 mL | 3 | SC |
| | naïve | (106-13(4)) | | as 3 mg/kg) | | | |
| 6 | 4 non- | STP144G | 1757 | 2.5 (Target | 3.0 mL | 1 | SC |
| | naïve | (13(5)) | | as 1 mg/kg) | | | |
| 7 | 4 non- | STP144G | 1757 | 7.5 (Target | 3.0 mL | 3 | SC |
| | naïve | (13(5)) | | as 3 mg/kg) | | | |
| 8 | 4 non- | STP144G(13(5)) | 1757 | 25 (Target | 3.0 mL | 10 | SC |
| | naïve | | | as 10 mg/kg) | | | |
| 9 | 4 non- | STP144G | 1757 | 7.5 (Target | 3.0 mL | 3 | SC |
| | naïve | (13(5)) | | as 3 mg/kg) | | | |

Note:
1. Test article storage: at 4° C., protected from light (DO NOT FREEZE the test article)
2. For all groups, animals will be fed on daily diet.
3. For all groups, saline will be used for vehicles

TABLE 7
Dose and Sample Collections

| | | Day | Day | Wk | Wk | Wk | Wk | Wk | Wk | Wk | Wk | Wk | Wk | Wk | Wk | Wk |
|---|---|---|---|---|---|---|---|---|---|---|---|---|---|---|---|---|
| | Group | −7 | 0 | 1 | 2 | 3 | 4 | 5 | 6 | 7 | 8 | 9 | 10 | 11 | 12 | 13 |
| Dose | 1 | | QD | | | | | | | | | | | | | |
| | 2 | | QD | | | | | | | | | | | | | |
| | 3 | | QD | | | | | | | | | | | | | |
| | 4 | | QD | | | | | | | | | | | | | |
| | 5 | | QD | QD | QD | | | | | | | | | | | |
| | 6 | | QD | | | | | | | | | | | | | |
| | 7 | | QD | | | | | | | | | | | | | |
| | 8 | | QD | | | | | | | | | | | | | |
| | 9 | | QD | QD | QD | | | | | | | | | | | |
| Clinical | 1-9 | BI, | | BI, | BI, | BI, | BI, | | BI, | | BI, | | BI, | | | BI, |
| Pathology ^{a} | | Se | | Se | Se | Se | Se | | Se | | Se | | Se | | | Se |
| Pharma | 1-9 | P, | P, | P, | P, | P, | P, | P, | P, | P, | P, | P, | P, | P, | P, | P, |
| co- | | Se | Se | Se | Se | Se | Se | Se | Se | Se | Se | Se | Se | Se | Se | Se |
| dynamics ^{b} | | | | | | | | | | | | | | | | |

1. Wk 1 point should be 7 days after Day 0; Wk 2 point should be 14 days after Day 0.
2. Single dose with single compound, subcutaneous injection. For Day 0, Wk 1, and Wk 2, animals will be dosed after all sample collections.

### Study Information

### 4.1.1 Study Objective

[0354] The objective of this study is to determine the pharmacodynamics (PD) of STP144G following a single/repeat subcutaneous (SC) administration in male cynomolgus monkeys.

### 4.1.2 Test Article and Vehicle Information

TABLE 8
Test Articles

| | | | Molecular | | | | | |
|---|---|---|---|---|---|---|---|---|
| | SEQ | | Weight of | Molecular | | | | |
| Test | ID | Lot/Batch | Free | Weight of | Salt | Chemical | Purity | |
| Article | No. | Number | Base | Salt | Factor | Formula | (%) | Storage |
| STP144G | 1758 | K1 | Refer to | Refer to | Refer to | Refer to | 83% | 4 C |
| (106-13(4) | | | product | product | product | product | | |
| as + s) | | | CoA | CoA | CoA | CoA | | |
| STP144G | 1757 | K1 | Refer to | Refer to | Refer to | Refer to | 83% | 4 C |
| (13(5) | | | product | product | product | product | | |
| as + s) | | | CoA | CoA | CoA | CoA | | |

*Free base
NA = Not applicable

### 4.1.3 Blood Collection for Clinical Pathology

[0355] All blood samples will be collected from a peripheral vessel from restrained, non-sedated animals.

TABLE 9
Clinical Pathology Schedule

| | | | | | | Sample |
|---|---|---|---|---|---|---|
| | | | | | | Volume |
| | | Sampling | | Tube Type/Size | | approximately |
| Groups | Sample | Schedule^{a} | Evaluations | Information | | (minimum) |
| 1-9 | Blood | Once during | Hematology | K₂EDTA | 2 mL | 2.0 mL (1.0 mL) |
| | | pre-study | Clinical | Plain with | 1.4 mL | 0.7 mL (0.6 mL) |
| | | (Day −16); | Chemistry | separating | | |
| | | Weeks 1, 2, 3, | | gel | | |
| | | 4, 6, 8, 10, 13. | | | | |

^{a}Blood sample may be collected from animals subjected to unscheduled euthanasia. Animals may not be fasted under that circumstance.

[0356] (1) Blood Collection for Hematology: Whole blood (at least 1.0 mL) will be collected from the animals into commercially available tubes with Potassium (K2) EDTA at room temperature (RT). The blood samples will be sent to clinical pathology lab in RT and tested for hematology parameters listed in the Table 8.

[0357] Erythrocyte count (RBC), Red cell distribution width (RDW), Hematocrit (HCT), Platelet count (PLT), Hemoglobin (HGB), Mean platelet volume (MPV), Mean corpuscular volume (MCV), Leukocyte counts (WBC), and Differential (absolute and percent), Mean corpuscular hemoglobin (MCH), Blood smear for possible cytology, Mean corpuscular hemoglobin concentration (MCHC), Absolute reticulocyte count (Retic), Hemoglobin Concentration Distribution Width (HDW) and Platelet Distribution Width (PDW)

[0358] A blood smear will be prepared from each hematology sample. Blood smears will be labeled, stained, and stored. Blood smears may be read to investigate results of the hematology analyses. If additional examination of blood smears is deemed necessary, the smears may be evaluated subsequently and this evaluation will be described in a study plan amendment.

[0359] (2) Blood Collection for Clinical Chemistry: Whole blood samples (approximately 1.4 mL) without anticoagulant will be collected into commercially available plain tubes with separating gel, held at RT up-right for at least 30 minutes, and sent to clinical pathology lab. The samples will be processed to serum, which will be examined for the parameters listed in Table 8.

[0360] Alkaline Phosphatase (ALP), Total Protein (TP), Alanine Aminotransferase (ALT), Albumin (ALB), Aspartate Aminotransferase (AST), g-glutamyltransferase (GGT), Bilirubin, total (TBIL), Globulin (GLB), Phosphorus (P), Albumin/Globulin Ratio Creatinine (CRE), Sodium (Na), Glucose (GLU), Chloride (Cl), Calcium (Ca), Triglycerides (TG), Total Cholesterol (TCHO), Urea (UREA), Potassium (K), Creatine Kinase (CK), Lactate Dehydrogenase (LDH), Glutamate dehydrogenase (GLDH)

### 4.1.4 Blood Collection for Pharmacodynamics (PD)

[0361] Blood: All blood samples will be collected from a peripheral vessel from restrained, non-sedated animals.

### Animals: All Available, all Groups

TABLE 10
Pharmacodynamics Schedule

| | | | | | | Sample Volume |
|---|---|---|---|---|---|---|
| | | Sampling | | Tube Type/Size | | approximately |
| Groups | Sample | Schedule^{a} | Evaluations | Information | | (minimum) |
| 1-9 | Blood | Once during | CFB ELISA | K₂EDTA | 2 mL | 1.5 mL (1.0 mL) |
| | | pre-study | | | | |
| | | (Day −16); | | | | |
| | | Day 1, and | Serum | Plain with | 3 mL | 1.5 mL (1.3 mL) |
| | | weekly | | separating | | |
| | | thereafter. | | gel | | |

1. ^{a}Blood sample may be collected from animals subjected to unscheduled euthanasia. Animals may not be fasted under that circumstance.

### Post-Dose

[0362] Blood volume: Approximately 5.0 mL total
[0363] Frequency: Refer to Table 8. Actual sample collection times will be recorded in the study records. For samples collected within the first hour of dosing, a ±1 minute is acceptable. For the remaining time points, samples that are taken within 5% of the scheduled time are acceptable and will not be considered as protocol deviation.
[0364] Sample Processing: For CFB ELISA: 2 mL Blood will be collected into a tube (Purchased from sponsor's required company) containing K2EDTA on wet ice. Then all the blood will be mixed upside down 4 times. Samples will be centrifuged (1000 g for 20 minutes at 4° C.) and approximately 1 mL plasma will be transferred into two tubes quickly (approximately 0.50 mL per tube). All tubes should be flash frozen, and then stored at −80° C.
[0365] For Serum: Whole blood samples (approximately 3.0 mL) without anticoagulant will be collected in serum separator tubes. Invert the tubes gently 4 times. Then held at RT and up-right for 30 minutes, to allow clotting, and then samples will be centrifuged (3200 g for 10 minutes at 4° C.) and approximately 1.5 mL serum will be transferred into three tubes quickly (approximately 0.50 mL per tube).

### Results

[0366] Max reduction of Factor Bb and duration of response (see FIG. 3a):
[0367] 106-13(4) (SEQ ID No. 1758)
   [0368] Max suppression of 74% at week 5
   [0369] >60% reduction from week 2 to week 13
   [0370] Mean BLQ from week 2 to week 10
[0371] 13(5) (SEQ ID No. 1757)
   [0372] Max suppression of 59% at week 6
   [0373] >50% reduction from week 2 to week 13
   [0374] No Mean BLQ for any of the timepoints

[0375] Max reduction of Factor Bb and duration of response (see FIG. 3b):
[0376] 106-13(4) (SEQ ID No. 1758)
   [0377] Max suppression of 68% at week 6
   [0378] >50% reduction from week 4 to week 13
   [0379] Mean BLQ at week 6
[0380] 13(5) (SEQ ID No. 1757)
   [0381] Max suppression of 68% at week 6
   [0382] >50% reduction from week 2 to week 13
   [0383] Mean BLQ from week 6 to week 11

### Example 5

### Dose Response and Duration Response In Vivo in a Humanized Liver Mouse Model

[0384] The purpose of this study is to evaluate a dose- and duration-response effect of selected candidate leads for GalNAc-siRNA constructs targeting Complement Factor B (CFB) in a humanized liver UPA-SCID mouse model. Test articles will be administered via subcutaneous administration and evaluated at 14 and 42 days post-dose. Endpoints will include the collection of liver punch biopsies, and the collection of serum and plasma samples for the evaluation of Factor Bb and CFB activity in the Factor Bb ELISA and hemolytic assay, respectively.

### Materials and Methods

### Test and Control Articles

[0385] Vehicle: Phosphate Buffered Saline (PBS)

| | |
|---|---|
| Identification | PBS |
| Description | Vehicle |
| Appearance | Clear solution |
| CAS Number | N/A |
| Manufacturer/ | Will be documented in study records and final report |
| Supplier | |
| Storage Conditions | Ambient |
| Catalog Number | Will be documented in study records and final report |
| Lot/Batch Number | Will be documented in study records and final report |
| Expiration/Retest | Will be documented in study records and final report |
| Date | |
| Sterility | Sterile |
| Purity | Will be documented in study records and final report |
| pH | Will be documented in study records and final report |
| Dose Concentration | 0 mg/kg |
| Dose Volume | 200 μL fixed volume |
| Route | Subcutaneous injection |
| Dosing Frequency | Once on Day 0 |
| Dose Preparation | N/A |

[0386] Test Article: CFB mxRNA #13(5)

| Identification | CFB13(5) (SEQ ID No. 1757) | |
|---|---|---|
| Description | GalNAc-siRNA targeting Complement Factor B | |
| Appearance | Clear liquid | |
| CAS Number | N/A | |
| Storage Conditions | 4° | C. |
| Lot/Batch Number | N/A | |
| Expiration/Retest | N/A | |
| Date | | |
| Sterility | <1 | EU/mg |

| | |
|---|---|
| Purity | >80% |
| pH | N/A |
| Dose Levels | 10 and 30 mg/kg (approximated - fixed |
| | volumed will be administered) |
| Dose Volume | 200 μL fixed volume |
| Dose Concentrations | N/A |
| Route | Subcutaneous injection in scruff |
| Dosing Frequency | Once on Day 0 |
| Dose Preparation | Ready to inject solutions will be provided |

[0387] Test Article: CFB mxRNA #106-13(4)

| Identification | CFB - 106-13(4) (SEQ ID No. 1758) | |
|---|---|---|
| Description | GalNAc-siRNA targeting Complement Factor B | |
| Appearance | Clear liquid | |
| CAS Number | N/A | |
| Storage Conditions | 4° | C. |
| Lot/Batch Number | N/A | |
| Expiration/Retest | N/A | |
| Date | | |
| Sterility | <1 | EU/mg |

| | |
|---|---|
| Purity | >80% |
| pH | N/A |
| Dose Levels | 10 and 30 mg/kg (approximated - fixed |
| | volumed will be administered) |
| Dose Volume | 200 μL fixed volume |
| Dose Concentrations | N/A |
| Route | Subcutaneous injection in scruff |
| Dosing Frequency | Once on Day 0 |
| Dose Preparation | Ready to inject solutions will be provided |

### Dose Formulation

[0388] No preparation is required for the test material as it will be received as ready-to-dose formulations.

### Identification of Test and Control Articles

[0389] All test article, positive control, and vehicle control storage containers will be labelled at a minimum with identification (including lot/batch number, if available), storage conditions, and expiration/retest date, if available.

### Test System

### Justification of Test System

[0390] Humanized liver uPA-SCID mice are reported to have up to 95% human hepatocyte engraftment; normal human liver histology and function; human-specific metabolism and excretion pathways; expression of human genes, mRNA, and proteins; human-like lipid profiles, production of human albumin and human-like biliary excretion, and a wide range of research applications. Thus, humanized liver uPA-SCID mice are an ideal test system for the evaluation of therapeutics that involve CFB targets as CFB is produced in the liver.

### Animals

[0391] Female humanized liver uPA-SCID mice (approximately 22-24 weeks old) were acclimated at least 7 days prior to use. Only animals in good health prior to dosing will be assigned to the study. The animals will be monitored daily for the appearance of local or systemic toxicity. All animals will be housed in clean room and animal handling will be performed in a sterilized biological safety cabinet by trained personnel wearing appropriately disinfected personal protective equipment.

### Methodology

### Study Outline

[0392] On Day 0, all study animals will be dosed by subcutaneous injection according to the Study Outline below. Clinical observations will be recorded daily. The study design will require 32 female mice (4 mice per treatment group, plus 2 extra mice). On Day 14, 4 vehicle animals (Group 1A), 8 CFB mxRNA #13(5) animals (Groups 2A and 2B), and 8 CFB mxRNA #106-13(4) animals (Groups 3A and 3B) will be euthanized. On Day 42, 4 CFB mxRNA #13(5) animals (Group 2C), and 4 CFB mxRNA #106-13(4) animals (Group 3C) will be euthanized. At each time point, terminal blood collections for serum and plasma, liver punch biopsies, and the collection of remaining liver tissue will be performed.

TABLE 11
Study Schedule
Study Outline¹

| Terminal | | | CFB mxRNA |
|---|---|---|---|
| Time | Control | CFB mxRNA #13(5) | #106-13(4) SEQ |
| point | (PBS) | SEQ ID No. 1757 | ID No. 1758 |
| Day 14 | Group 1A | Group 2A | Group 3A |
| | | (10 mg/kg) | (10 mg/kg) |
| | | Group 2B | Group 3B |
| | | (30 mg/kg) | (30 mg/kg) |
| Day 42 | Group 1B | Group 2C | Group 3C |
| (Week 6) | | (10 mg/kg) | (10 mg/kg) |

¹n = 4/group. Two extra mice will serve as replacements due to health conditions or body weight outliers.

### Body Weights

[0393] Body weights will be collected at receipt (for general health assessment), on Day −1, and at terminal time points prior to euthanasia.

### Dosing (Day 0)

[0394] On Day 0, all mice will be injected subcutaneously with vehicle or test article per the Study Outline Table. Each animal will be injected subcutaneously in scruff with an injection volume of 200 uL.

### Daily Observations

[0395] All animals will be observed at least once daily for clinical signs. As humanized mice are predisposed to opportunistic infection due to compromised immune function. Staff will monitor mice for clinical signs that may indicate infection, including ruffled fur and hunched posture that become more pronounced beyond the slightly ruffled fur and hunched posture that exists at baseline, and decreased activity. Common infections to be aware of in these mice include: infected skin wounds, cellulitis, abscesses (skin and internal organs), otitis media, conjunctivitis, panophthalmitis, and localized and widespread infections involving liver, heart, lungs, uterus, accessory sex glands. While not indicative of infection, abdominal distension (related to liver tissue engraftment) may be observed and if observed, will be noted.

### Unscheduled Deaths and Moribund Animals

[0396] Moribund animals displaying severe effects will be discussed with the veterinarian or euthanized at the veterinarian's and Study Director's recommendation. Animals will be monitored with an increased frequency (up to twice daily; at least 5 hours between observations) if adverse clinical signs are observed, including mortality of other animals on study. Abnormal findings will be recorded as they are observed.

[0397] Samples will be collected from animals found dead and carcasses will be discarded without further evaluation.

### Terminal Procedures (Day 14 and Day 42)

[0398] All mice remaining at the scheduled intervals (Days 14 and 42) will be euthanized by asphyxiation with CO2, and terminal blood collections will be collected via cardiac stick or the inferior vena cava (maximum volume, collection site to be documented in the study records) for processing to serum and plasma. Terminal body weights will be collected prior to euthanasia.

### Plasma and Serum Processing

[0399] Following terminal collections on Days 14 and 42, respectively, blood will be processed to plasma for Factor Bb analysis and to serum for the hemolytic assay. Blood sample volumes will be divided evenly for plasma and serum processing.

### Plasma

[0400] Blood samples will be placed into K2 EDTA blood collection tubes and inverted 8-10 times to ensure adequate mixing. Samples will be maintained cold, on ice, and centrifuged in an instrument set to 2-4° C. and ≤1300×g for 10 minutes, within 60 minutes of sample collection. Each plasma sample will be aliquoted into two fresh, labelled collection tubes and stored frozen at <−70° C. until analysis is performed.

### Serum

[0401] Blood samples will be placed into blood collection tubes without anti-coagulant and allowed to clot for 30-60 minutes. Samples will then be processed to serum following centrifugation at 2500×g for 5 minutes in an instrument set to room temperature. Each serum sample will be aliquoted into a fresh, labeled collection tube and snap-frozen with dry ice immediately following collection. Sample tubes will be labeled with the study number and sample type, and stored at <−70° C. until analysis is performed.

### Organ Processing

[0402] Three (3) liver punch biopsies (2 mm) will be obtained from each collected liver (taken from the left, middle, and right lobes, respectively) and placed into separate, labeled 2 mL tubes containing RNALater. Liver punch biopsies will be allowed to soak in the RNALater for 15 minutes, then will be flash-frozen and stored at <−70° C.

### Results

[0403] Mice with humanized liver cells (and retaining about 20 to 25% murine liver cells) have been used to study performance of two particularly advantageous compounds of the disclosed embodiments.

[0404] FIG. 5 shows an overview of the study protocol.

[0405] FIG. 6 shows knock-down at the mRNA level by two compounds of the disclosed embodiments as compared to negative control after 2 and 6 weeks.

[0406] FIG. 7 shows amounts of CFB (“Factor B”) as well as of Factor Bb (as further read-out for CFB and complement pathway down-regulation) in plasma as compared to negative control after 2 and 6 weeks.

[0407] The data demonstrate significant knock-down at both mRNA and protein level for both compounds, where 106-13(4) outperforms 13(5). A certain rebound after six weeks, to a lesser extent for the former compound, can be seen.

[0408] As regards protein levels, and including component Bb of the complement pathway, an even more persistent knock-down is observed. In particular, compound 106-13(4) shows Bb knock-down in plasma at a level of 64% reduction still after 6 weeks. Such findings are indicative of a favourable dosage regimen requiring administration in large intervals such as every 2, 3, 4, 5, 6, 7, 8, 9 or 10 weeks.

### Example 6

### Materials and Methods

### Cell Culture:

[0409] Human primary hepatocytes (5 donor pooled—Sekisui XenoTech, HPCH05+) were thawed immediately prior to experimentation and cultured in 1× complete Williams medium (Gibco, A1217601) supplemented with Hepatocytes plating supplement pack (Gibco, CM3000). FBS concentration was modified from manufacture recipe to a final 2.5% (as opposed to 5%) for compound stability.

[0410] 1× Complete WEM: 2.5% FBS, 1 μM Dexamethasone, Pen/Strep (100 U/mL/100 μg/mL), 4 μg/ml Human Insulin, 2 mM GlutaMAX, 15 mM HEPES, pH 7.4.

### C5 Target Identification and Duplex Preparation:

[0411] Oligomeric compounds targeting C5 were identified by bioinformatic analysis on human C5 mRNA sequence as given in RefSeq sequence ID NM_001735.2. 100 compounds were selected for synthesis as mxRNA hairpins. Compounds were dissolved to 50 uM in molecular biology grade water. Duplexes were annealed by heating at 95° C. for 5 minutes followed by gradual cooling to room temperature. mxRNAs were annealed by heating at 95° C. for 5 minutes followed by rapid cooling on ice.

### C5—Primary Screen:

[0412] On the day of transfection, primary human hepatocytes were thawed in 45 mL of human OptiThaw (Sekisui XenoTech, K8000) and centrifuged down at 200 g for 5 minutes. Cells were resuspended in 2× complete WEM and counted. Cells were then plated in 50 μL of 2× complete WEM at 25,000 cells per well on 96 well type 1 rat tail Collagen plates and allowed to rest and attach for four hours before transfection. After rest, the compounds were diluted further to 2 μM in basal WEM. 50 μL of each 2 μM compound was added to respective triplicates of the plated hepatocytes for a final concentration of 1 μM in a volume of 100 uL 1× complete WEM.

[0413] 72 hours post transfection, cells were harvested and RNA isolated using the PureLink Pro 96 total RNA Purification Kit (ThermoFisher, 12173011A) according to the manufacturer protocol. Harvested RNA was assayed for C5 expression via Taqman qPCR using the Luna Universal Probe One-Step RT-qPCR Kit (NEB, E3006). A qPCR assay was performed for each sample using a C5 TaqMan probe set (Hs01004342_m1-FAM) multiplexed with a common GAPDH VIC probe (ThermoFisher, 4326317E). Thermocycling and data acquisition was performed with an Applied Biosystems QuantStudio 3/5 Real-Time PCR System.

### C5—Secondary Screen:

[0414] Based on data from the primary screen, a narrower set of the best performing 25 C5-targeting mxRNA constructs were tested in dose curves (See Table 12). Compounds were diluted further to 2 μM in basal WEM. A seven step, five fold dilution series was prepared in basal WEM from 2 μM to 0.000128 μM. 50 μL of each dilution was added to respective triplicates of the plated hepatocytes for a final dilution series of 1 μM down to 0.000064 μM in a volume of 100 uL 1× complete WEM.

[0415] 72 hours post transfection, cells were harvested and RNA isolated using the PureLink Pro 96 total RNA Purification Kit (ThermoFisher, 12173011A) according to the manufacturer protocol. Harvested RNA was assayed for C5 expression via Taqman qPCR using the Luna Universal Probe One-Step RT-qPCR Kit (NEB, E3006). A qPCR assay was performed for each sample using a C5 TaqMan probe set (Hs01004342_m1-FAM) multiplexed with a common GAPDH VIC probe (ThermoFisher, 4326317E). Thermocycling and data acquisition was performed with an Applied Biosystems QuantStudio 3/5 Real-Time PCR System.

### Example 7

### Results

[0416] FIG. 8 shows results of the primary screening of selected compounds according to the disclosed embodiments and their activity in inhibiting C5 expression.

[0417] Table 12 below shows IC50 values (in nM) for 25 advantageous constructs selected in accordance with the examples. Max % KD indicates the maximally achieved knock-down at 1000 nM with 0% being no knock-down and 100% full knock-down. M4K4 was used as reference.

| SEQ ID No. | Construct ID | Max % KD | IC₅₀ |
|---|---|---|---|
| 1988 | C5-m-30 | 71.88574381 | 4.943 |
| 1995 | C5-m-37 | 77.48131233 | 11.25 |
| 2041 | C5-m-83 | 59.57363723 | 21.99 |
| 2019 | C5-m-61 | 68.93837532 | 40.04 |
| 2032 | C5-m-74 | 63.30023809 | 41.25 |
| 2040 | C5-m-82 | 62.26208156 | 68.84 |
| 2045 | C5-m-87 | 63.87542555 | 89.55 |
| 2013 | C5-m-55 | 63.0068919 | 90.72 |
| 1981 | C5-m-23 | 60.00147173 | 213.2 |
| 1986 | C5-m-28 | 50.59311869 | 295.4 |
| 2000 | C5-m-42 | 49.72928101 | 302.6 |
| 2013 | C5-m-73 | 48.77874599 | 351.7 |
| 2024 | C5-m-66 | 56.30345942 | 351.9 |
| 2005 | C5-m-47 | 53.46576404 | 367.2 |
| 2004 | C5-m-46 | 50.25328616 | 416.7 |
| 1985 | C5-m-27 | 48.71998765 | 583.3 |
| 1974 | C5-m-16 | 50.77488697 | 629.7 |
| 2001 | C5-m-43 | 43.01211645 | 779.6 |
| 1994 | C5-m-36 | 48.1079184 | 894.2 |
| 2030 | C5-m-72 | 44.02312363 | 1090 |
| 2011 | C5-m-53 | 40.3528029 | 1167 |
| 1972 | C5-m-14 | 38.57830035 | 2282 |
| 2033 | C5-m-75 | 38.99786713 | 3485 |
| 2017 | C5-m-59 | 32.76891127 | 5167 |
| 2014 | C5-m-56 | 22.82809496 | 6117 |
| Reference | M4K4 | 11.680749 | 3810 |

[0418] The IC50 data in the single- to low double-digit nanomolar range demonstrate outstanding performance of numerous constructs of the disclosed embodiments. Furthermore, no obvious toxicity was observed.

[0419] Further results of the screening and the outstanding performance of the above disclosed constructs in Table 12 data are shown in FIG. 9.

[0420] Table 13 below shows IC50 values (in nM) for 6 advantageous C5 constructs selected in accordance with the examples. Max % KD indicates the maximally achieved knock-down at 1000 nM with 0% being no knock-down and 100%, full knock-down.

| SEQ ID No. | Construct ID | KD % at 1000 nM | IC₅₀ (nM) |
|---|---|---|---|
| 1988 | C5-m-30 | 85.136214 | 2.939 |
| 1995 | C5-m-37 | 85.717658 | 5.605 |
| 2041 | C5-m-83 | 71.592597 | 37.45 |

[0421] Further results of the constructs in Table 13 above with different concentrations are shown in FIG. 10.

[0422] Table 13 and FIG. 10 show C5 large scale preparations mirrored the screening synthesis very closely. C5-m-30 and C5-m-37 had 85% knockdowns and C5-m-83 had a 72% knockdown at the highest dose.

### Example 8

Complement Component C5 Targeting mxRNA Leads for Candidate Dose and Duration Response Study in Humanized Liver-uPA-SCID Mice Model, Non-GLP

### 1. Study Objective(S)

[0423] The objective of this non-GLP study is to evaluate the dose and duration response of GalNAc conjugated complement component C5 targeting mxRNA constructs in humanized liver-uPA-SCID. The compound(s) will be administered subcutaneously, and the mice will be survived for up to 42 days.

[0424] Prior to necropsy, plasma and serum will be collected. At necropsy, 3 liver biopsies (2 mm) per animal will be preserved in separate vials in RNAlater, flash frozen, and stored at −80° C. Three more liver biopsies (2 mm) will be taken, flash frozen in the same vial, and stored at −80° C.

### 2. Regulatory Compliance

[0425] This non-GLP study will not be conducted in accordance with the Food and Drug Administration's Good Laboratory Practice (GLP) regulations (21 CFR Part 58).

### 3. Animal Welfare Compliance

[0426] This protocol has been reviewed and approved by the Test Facility IACUC Committee.

### 4. Test System Information

[0427] 4.1. Animal Test
   [0428] 4.1.1. Common Name: Mouse
   [0429] 4.1.2. Breed/Class: Rodent—humanized liver-uPA-SCID mice model
   [0430] 4.1.3. Number of Animals (by gender): 44 Male all naïve
[0431] 4.2. Acclimation Period:

### 4.2.1. Duration:

[0432] All animals will be acclimated for a minimum period of five (5) days prior to release by the attending veterinarian, at which time the overall health of the animals will be evaluated.

4.2.2. Required Medication and/or Vaccination:
[0433] All rodents received will come from a vendor that is certified to be free of any lethal parasites that may affect the facility's total colony.
[0434] All rodents must be accompanied by a sentinel report including statistical analysis.
[0435] Each shipment of rodents must be housed separately from others in the facility.

### 4.3. Animal Identification Method and Location:

[0436] Animals will be assigned sequential numbers. The animals will be ear notched by the vendor prior to shipment to permanently identify each animal. Animals may have color markings to distinguish between similar ear notches. A cage card will also be affixed to each animal cage denoting the animal number, gender, vendor, strain, study director, and study number.

### 5. STUDY DESIGN

### 5.1. Design Details

[0437] This study will have one type of mice, N=44. Animals will be grouped by treatment type, dosage, and survival period. Each animal will be treated by subcutaneous injection of test material. See study table 1 for details.

[0438] At necropsy, three 2 mm biopsy punches will be taken from the left, middle and right liver lobes, placed in separate vials, soaked in RNAlater for 15 minutes, flash frozen and stored at −80° C. Another three 2 mm liver biopsies from the left, middle and right liver lobes will be placed into one vial, flash frozen and stored at −80° C. The rest of the liver will be flash frozen and stored in 10 mL conical tubes at −80° C.

[0439] The study schedule is also shown in FIG. 11.

TABLE 14
Dose information

| Terminal | Control | C5-m-30 | C5-m-37 |
|---|---|---|---|
| Timepoint | (PBS) | SEQ ID No. 1988 | SEQ ID No. 1995 |
| Week 2 | Group | Group 2A | Group 3A |
| | 1A | (10 mg/kg) | (10 mg/kg) |
| | (N = 4) | (N = 4) | (N = 4) |
| | | Group 2B | Group 3B |
| | | (30 mg/kg) | (30 mg/kg) |
| | | (N = 4) | (N = 4) |
| Week 6 | Group | Group 2C | Group 3C |
| | 1B | (10 mg/kg) | (10 mg/kg) |
| | (N = 4) | (N = 4) | (N = 4) |
| | | Group 2D | Group 3D |
| | | (30 mg/kg) | (30 mg/kg) |
| | | (N = 3) | (N = 3) |
| | | Group 2E | Group 3E |
| | | 2x (10 mg/kg) | 2x (10 mg/kg) |
| | | (N = 3) | (N = 3) |

TABLE 15
Study table

| | Number | Treatment - | | | |
|---|---|---|---|---|---|
| | of | Subcutaneous | TX | Survival | Pre-Euthanasia and |
| Group | Animals | Injection | Days | Days | Necropsy |
| 1A | 4 | Control (PBS) | 0 | 14 | Pre-Euthanasia: |
| 1B | 4 | Control (PBS) | 0 | 42 | Plasma and serum |
| 2A | 4 | C5-m-30 | 0 | 14 | collection. |
| | | (10 mg/kg) | | | Necropsy: |
| 2B | 4 | C5-m-30 | 0 | 14 | 2 mm biopsy of left, |
| | | (30 m/kg) | | | middle and right liver |
| 2C | 4 | C5-m-30 | 0 | 42 | lobes in separate vials, |
| | | (10 m/kg) | | | in RNAlater for 15 min, |
| 2D | 3 | C5-m-30 | 0 | 42 | flash freeze then stored |
| | | (30 m/kg) | | | at −80° C. |
| 2E | 3 | C5-m-30 | 0, 7 | 42 | 2 mm biopsy of left, |
| | | (10 m/kg) | | | middle and right liver all |
| 3A | 4 | C5-m-37 (10 | 0 | 14 | in one vial, flash freeze |
| | | mg/kg) | | | then stored at −80° C. |
| 3B | 4 | C5-m-37 (30 | 0 | 14 | Rest of liver, flash freeze |
| | | mg/kg) | | | then stored at −80° C. |
| 3C | 4 | C5-m-37 (10 | 0 | 42 | |
| | | mg/kg) | | | |
| 3D | 3 | C5-m-37 (30 | 0 | 42 | |
| | | mg/kg) | | | |
| 3E | 3 | C5-m-37 (10 | 0, 7 | 42 | |
| | | mg/kg) | | | |
| Spares | 0 | | | | |
| Total | 44 | | | | |

### 6. Test Article and Ancillary Material Information

[0440] 6.1. Test Drug 1:
   [0441] 6.1.1. Identification: C5-m-30 (SEQ ID No. 1988)
   [0442] 6.1.2. Manufacturer: Sirnaomics
   [0443] 6.1.3. Description: GalNAc conjugated human Complement component C5 targeting mxRNA
   [0444] 6.1.4. Lot/Batch Number: Will be recorded on study materials form.
   [0445] 6.1.5. Expiration Date: Will be recorded on study materials form.
   [0446] 6.1.6. Storage Temperature: 4° C.
   [0447] 6.1.7. Bio-Hazard Status: None
   [0448] 6.1.8. MSDS*: TBD
   [0449] 6.1.9. Appearance: Clear Liquid
   [0450] 6.1.10. Dose Information: See Table 14
   [0451] 6.1.11. Residual Test Article Storage: None
[0452] 6.2. Test Drug 2:
   [0453] 6.2.1. Identification: C5-m-37 (SEQ ID No. 1995)
   [0454] 6.2.2. Manufacturer: Sirnaomics
   [0455] 6.2.3. Description: GalNAc conjugated human Complement component C5 targeting mxRNA
   [0456] 6.2.4. Lot/Batch Number: Will be recorded on study materials form.
   [0457] 6.2.5. Expiration Date: Will be recorded on study materials form.
   [0458] 6.2.6. Storage Temperature: 4° C.
   [0459] 6.2.7. Bio-Hazard Status: None
   [0460] 6.2.8. MSDS*: TBD
   [0461] 6.2.9. Appearance: Clear Liquid
   [0462] 6.2.10. Dose Information: See Table 1
   [0463] 6.2.11. Residual Test Article Storage: None

### Results

[0464] Results of the C5 gene knock down by constructs C5-m-30 and C5-m-37 in humanized liver-uPA-SCID mice are shown in the Tables below.

TABLE 16a
Results of C5 gene knockdown for construct C5-m-30 (see Table
3e for structure) at several time points using different doses.

| C5-m-30 | Knockdown values in liver |
|---|---|
| (SEQ ID No. 1988) | tissue |
| Single Tx - 10 mg/kg | 51% KD at 2 weeks |
| | 10% KD at 6 weeks |
| Single Tx - 30 mg/kg | 61% KD at 2 weeks |
| | 36% KD at 6 weeks |
| Repeat 2x Tx - 10 mg/kg | 17% KD at 6 weeks |

TABLE 16b
Results of C5 gene knockdown for construct C5-m-37 (see Table
3e for structure) at several time points using different doses.

| C5-m-37 | Knockdown values in liver |
|---|---|
| (SEQ ID No. 1995) | tissue |
| Single Tx - 10 mg/kg | 50% KD at 2 weeks |
| | 27% KD at 6 weeks |
| Single Tx - 30 mg/kg | 54% KD at 2 weeks |
| | 47% KD at 6 weeks |
| Repeat 2x Tx - 10 mg/kg | 40% KD at 6 weeks |

[0465] The results of the mouse study are also shown in FIG. 12.

### Example 9

### Cell Culture:

[0466] Human primary hepatocytes (5 donor pooled—Sekisui XenoTech, HPCH05+) were thawed immediately prior to experimentation and cultured in 1× complete Williams medium (Gibco, A1217601) supplemented with Hepatocytes plating supplement pack (Gibco, CM3000). FBS concentration was modified from manufacture recipe to a final 2.5% (as opposed to 5%) for compound stability.

[0467] 1× Complete WEM: 2.5% FBS, 1 μM Dexamethasone, Pen/Strep (100 U/mL/100 μg/mL), 4 μg/ml Human Insulin, 2 mM GlutaMAX, 15 mM HEPES, pH 7.4.

[0468] Hepatocytes were plated on Collagen I (rat tail) coated 96 well tissue culture plates (Gibco, A1142803).

### CFB-C5 Combo Screen:

[0469] On the day of transfection, primary human hepatocytes were thawed in 45 mL of human OptiThaw (Sekisui XenoTech, K8000) and centrifuged down at 200 g for 5 minutes. Cells were resuspended in 2× complete WEM and counted. Cell were then plated in 50 μL of 2× complete WEM at 25,000 cells per well on 96 well type 1 rat tail Collagen plates and allowed to rest and attach for four hours before transfection.

[0470] Compounds were diluted further to 2 μM in basal WEM. A seven step, fivefold dilution series was prepared in basal WEM from 2 μM to 0.000128 μM. 50 μL of each dilution was added to respective triplicates of the plated hepatocytes for a final dilution series of 1 μM down to 0.000064 μM in a volume of 100 uL 1× complete WEM.

[0471] 72 hours post transfection, cells were harvested and RNA isolated using the PureLink Pro 96 total RNA Purification Kit (ThermoFisher, 12173011 A) according to the manufacturer protocol. Harvested RNA was assayed for CFB and C5 expression via TaqMan qPCR using the Luna Universal Probe One-Step RT-qPCR Kit (NEB, E3006). A single qPCR assay was performed for each sample using an CFB and C5 multiplexed with a common GAPDH VIC probe (ThermoFisher, 4326317E). Thermocycling and data acquisition was performed with an Applied Biosystems QuantStudio 3/5 Real-Time PCR System.

[0472] Table 17a below shows IC50 values (in nM) for 4 advantageous muRNA constructs (see Table 4b) and gene knock down for CFB gene. Max % KD indicates the maximally achieved knock-down at 1000 nM with 0% being no knock-down and 100% full knock-down.

| | | Max KD % at | |
|---|---|---|---|
| SEQ ID No. | Construct ID | 1000 nM | IC₅₀ (nM) |
| 2067-2068 | B106-C5-30 | 82.808135 | 2.008 |
| 2069-2070 | B106-C5-37 | 84.403628 | 3.914 |
| 2071-2072 | B13-C5-30 | 6.4534394 | 7029 |
| 2073-2074 | B13-C5-37 | −0.04102 | 4.362E−08 |

[0473] Table 17b below shows IC50 values (in nM) for 4 advantageous muRNA constructs (see Table 4b) and gene knock down for C5 gene. Max % KD indicates the maximally achieved knock-down at 1000 nM with 0% being no knock-down and 100% full knock-down.

| | | Max KD % at | |
|---|---|---|---|
| SEQ ID No. | Construct ID | 1000 nM | IC₅₀ (nM) |
| 2067-2068 | B106-C5-30 | 74.461352 | 21.66 |
| 2069-2070 | B106-C5-37 | 73.32972 | 16.58 |
| 2071-2072 | B13-C5-30 | 56.448925 | 228.5 |
| 2073-2074 | B13-C5-37 | 70.985602 | 18.22 |

[0474] The results are also shown in FIGS. 13a and 13b.

### Example 10

Dose Response Study Evaluating Human Complement Combination (C5 and CFB; muRNA) Targeting Leads for Candidate in Humanized Liver-uPA-SCID Mice Model, Non-GLP

### 1. Study Objective(S)

[0475] The objective of this non-GLP study is to evaluate, in humanized liver-uPA-SCID mice, the dose response of GalNAc conjugated human dual targeting (C5 and CFB) muRNA constructs. The compound(s) will be administered subcutaneously, and the mice will be survived for up to 14 days.

[0476] Prior to necropsy, blood will be collected for plasma samples. At necropsy, 3 liver biopsies (2 mm) per animal will be preserved in separate vials in RNAlater, flash frozen, and stored at −80° C. Three more liver biopsies (2 mm) will be taken, flash frozen in the same vial, and stored at −80° C. The remaining liver will be flash frozen and stored at −80° C.

### 2. Regulatory Compliance

[0477] This non-GLP study will not be conducted in accordance with the Food and Drug Administration's Good Laboratory Practice (GLP) regulations (21 CFR Part 58).

### 3. Animal Welfare Compliance

[0478] This protocol has been reviewed and approved by the Test Facility IACUC Committee.

### 4. Test System Information

[0479] 4.1. Animal Test
   [0480] 4.1.1. Common Name: Mouse
   [0481] 4.1.2. Breed/Class: Rodent—Mouse humanized liver-uPA-SCID
   [0482] 4.1.3. Number of Animals (by gender): 32 Male PXB all naïve
[0483] 4.2. Acclimation Period:
   [0484] 4.2.1. Duration:

[0485] All animals will be acclimated for a minimum period of five (5) days prior to release by the Attending veterinarian, at which time the overall health of the animals will be evaluated. Animals, which are not released from acclimation will be treated accordingly and further evaluation will be performed prior to release. All records from the acclimation period will remain in the study file.

4.2.2. Required Medication and/or Vaccination:
[0486] All rodents received will come from a vendor that is certified to be free of any lethal parasites that may affect the facility's total colony.
[0487] All rodents must be accompanied by a sentinel report including statistical analysis.
[0488] Each shipment of rodents must be housed separately from others in the facility.

### 4.3. Animal Identification Method and Location:

[0489] Animals will be assigned sequential numbers. The animals will be ear notched to permanently identify each animal. This method involves punching holes or notches in the ear pinna while anesthetized. Alternatively, the animals may have a tattoo placed on their tail. A cage card will also be affixed to each animal cage denoting the animal number, gender, vendor, strain, study director, and study number.

### 5. Study Design

### 5.1. Design Details

[0490] This study will have one type of mice, N=32. Animals will be grouped by treatment type, dosage, and survival period. Each animal will be treated by subcutaneous injection of test material. Animals will be survived for 14 days. See study table 1 for details.

[0491] At necropsy, three 2 mm biopsy punches will be taken from the left, middle and right liver lobes, placed in separate vials, soaked in RNAlater for 15 minutes, flash frozen and stored at −80° C. Another three 2 mm liver biopsies from the left, middle and right liver lobes will be placed into one vial, flash frozen and stored at −80° C. The rest of the liver will be flash frozen and stored in 10 mL conical tubes at −80° C.

[0492] The schedule is also shown in FIG. 14.

TABLE 18
Study table

| | | Treatment | | |
|---|---|---|---|---|
| | Number | Subcutaneous | | |
| | of | Injection | Survival | Pre-Euthanasia and |
| Group | Animals | Day 0 | Days | Necropsy |
| 1A | 4 | Control (PBS) | 14 | Pre-Euthanasia: |
| 2A | 4 | B106-C5-30 5 mg/kg | 14 | Plasma and collection. |
| 2B | 5 | B106-C5-30 (10 | 14 | Necropsy: |
| | | mg/kg) | | 2 mm biopsy of left, |
| 2C | 5 | B106-C5-30 (30 | 14 | middle and right liver |
| | | mg/kg) | | lobes in separate vials, |
| 3A | 4 | B106-C5-37 (5 mg/kg) | 14 | in RNAlater for 15 min, |
| 3B | 5 | B106-C5-37 (10 | 14 | flash freeze then stored |
| | | mg/kg) | | at −80° C. |
| 3C | 5 | B106-C5-37 (30 | 14 | 2 mm biopsy of left, |
| | | mg/kg) | | middle and right liver all |
| Spares | 0 | | | in one vial, flash freeze |
| Total | 32 | | | then stored at −80° C. |
| | | | | Rest of liver, flash freeze |
| | | | | then stored at −80° C. |

### 6. Test Article and Ancillary Material Information

[0493] 6.1. Test Drug 1:
   [0494] 6.1.1. Identification: B106-C5-30 (STP247G, see Table 4b for structure, SEQ ID Nos. 2067-2068)
   [0495] 6.1.2. Manufacturer: Sirnaomics
   [0496] 6.1.3. Description: GalNAc-muRNA targeting human CFB and Complement C5 mRNA
   [0497] 6.1.4. Lot/Batch Number: Will be recorded on study materials form.
   [0498] 6.1.5. Expiration Date: Will be recorded on study materials form.
   [0499] 6.1.6. Storage Temperature: 4° C.
   [0500] 6.1.7. Bio-Hazard Status: None
   [0501] 6.1.8. MSDS*: TBD
   [0502] 6.1.9. Appearance: Clear Liquid
   [0503] 6.1.10. Dose Information: See Table 1
   [0504] 6.1.11. Residual Test Article Storage: None
[0505] 6.2. Test Drug 2:
   [0506] 6.2.1. Identification: B106-C5-37 (see Table 4b for structure, SEQ ID Nos. 2069-2070)
   [0507] 6.2.2. Manufacturer: Sirnaomics
   [0508] 6.2.3. Description: GalNAc-muRNA targeting human CFB and Complement C5 mRNA
   [0509] 6.2.4. Lot/Batch Number: Will be recorded on study materials form.
   [0510] 6.2.5. Expiration Date: Will be recorded on study materials form.
   [0511] 6.2.6. Storage Temperature: 4° C.
   [0512] 6.2.7. Bio-Hazard Status: None
   [0513] 6.2.8. MSDS*: TBD
   [0514] 6.2.9. Appearance: Clear Liquid
   [0515] 6.2.10. Dose Information: See Table 18
   [0516] 6.2.11. Residual Test Article Storage: None

### Results

[0517] Table 19a below shows results of CFB gene knockdown at 2 weeks for muRNA constructs B106-C5-30 and B106-C5-37 (see Table 4b for structure) for different doses.

% CFB mRNA KD in liver tissues

| | B106-C5-30 | B106-C5-37 |
|---|---|---|
| | (SEQ ID Nos. | (SEQ ID Nos. |
| Dosing | 2067-2068) | 2069-2070) |
| 10 mg/kg | 42% | 36% |
| 30 mg/kg | 73% | 65% |

[0518] Table 19b below shows results of C5 gene knockdown at 2 weeks for muRNA constructs B106-C5-30 and B06-C5-37 (see Table 4b for structure) for different doses.

% C5 mRNA KD in liver tissues

| | B106-C5-30 | B106-C5-37 |
|---|---|---|
| | (SEQ ID Nos. | (SEQ ID Nos. |
| Dosing | 2067-2068) | 2069-2070) |
| 10 mg/kg | 28% | 26% |
| 30 mg/kg | 50% | 58% |

[0519] The results of the dose response study evaluating human complement combination (C5 and CFB; muRNA) targeting Leads for Candidate in humanized liver-uPA-SCID mice model are also shown in FIGS. 15a and 15b.

### Example 11

### Evaluation of Duration Effect of STP247G (Complement C5Complement C5/Factor B Dual Targeting mxRNAmuRNA), in the Humanized Liver-uPA-SCID Mice (PXB) Model, Non-GLP

### Materials and Methods

### 1. Study Number

[0520] The objective of this non-GLP study is to evaluate, in humanized liver-uPA-SCID (PXB) mice, the duration effect of STP247G, construct B106-C5-30 (SEQ ID Nos. 2067-2068), combination Complement C5/Factor B targeting muRNA The compound(s) will be administered subcutaneously, and the mice will be kept alive for up to 84 days.

### 2. Test System Information

[0521] 2.1. Animal Test
   [0522] 2.1.1. Common Name: Mouse
   [0523] 2.1.2. Breed/Class: Rodent—Mouse PXB
   [0524] 2.1.3. Number of Animals (by gender): 40 Male PXB all naïve
   [0525] 2.1.4. Age Range: 14-19 weeks for PXB mice,
   [0526] 2.1.5. Weight Range: Approx. 20 grams for all mice
[0527] 2.2. Acclimation Period:
   [0528] 2.2.1. Duration:

[0529] All animals will be acclimated for a minimum period of seven (7) days prior to release by the Attending veterinarian, at which time the overall health of the animals will be evaluated. Animals which are not released from acclimation will be treated accordingly and further evaluation will be performed prior to release. All records from the acclimation period will remain in the study file.
[0530] 2.2.2. Required Medication and/or Vaccination:
   [0531] All rodents received will come from a vendor that is certified to be free of any lethal parasites that may affect the facility's total colony.
   [0532] All rodents must be accompanied by a sentinel report including statistical analysis.
   [0533] Each shipment of rodents must be housed separately from others in the facility.

### 3. Study Design

### 3.1. Design Details

[0534] This study will have one type of mice, 40 PXB. Animals will be grouped by treatment type, dosage, and survival period. Each animal will be treated by subcutaneous injection of test material.
[0535] Group 1A, 1B, 1C, and 1 D will have five animals and receive a single control dose of PBS.
[0536] Group 2A, 2B 2C, and 2D will have five animals and receive a single dose of STP247G at 50 mg/kg.

[0537] Animals will be survived for 14, 28, 56, and 84 days. See Table 20 for details.
[0538] Prior to necropsy, the animals will be deeply anesthetized, and a terminal blood draw will be performed through the vena cava. Blood volume will be collected in a plasma separation tube.
[0539] At necropsy, three 2 mm biopsy punches will be taken from the left, middle and right liver lobes, placed in separate vials, soaked in RNAlater for 15 minutes, flash frozen and stored at −80° C. Another three 2 mm liver biopsies from the left, middle and right liver lobes will be placed into one vial, flash frozen and stored at −80° C. The rest of the liver will be flash frozen and stored in 10 mL conical tubes at −80° C.

TABLE 20
Study Table

| | | | Treatment | | | |
|---|---|---|---|---|---|---|
| | Number | | Subcutaneous | | | |
| | of | Mouse | Injection | Survival | | Pre-Euthanasia and |
| Group | Animals | Type | Day 0 | Days | Blood | Necropsy |
| 1A | 5 | PXB | Control (PBS) | 14 | Blood | Pre-Euthanasia: |
| 1B | 5 | PXB | Control (PBS) | 28 | collected for | Plasma and collection. |
| 1C | 5 | PXB | Control (PBS) | 56 | plasma. | Necropsy: |
| 1D | 5 | PXB | Control (PBS) | 84 | Plasma will | 2 mm biopsy of left, |
| 3A | 5 | PXB | STP247G 50 | 14 | be evenly | middle and right liver |
| | | | mg/kg | | separated | lobes in separate |
| 3B | 5 | PXB | STP247G 50 | 28 | into two | vials, in RNAlater for |
| | | | mg/kg | | labeled vials. | 15 min, flash freeze |
| 3C | 5 | PXB | STP247G 50 | 56 | | then stored at −80° C. |
| | | | mg/kg | | | 2 mm biopsy of left, |
| 3D | 5 | PXB | STP247G 50 | 84 | | middle and right liver |
| | | | mg/kg | | | all in one vial, flash |
| Spares | 0 | PXB | | | | freeze then stored |
| Total | 40 | PXB | | | | at −80° C. |
| | | | | | | Rest of liver, flash |
| | | | | | | freeze then stored |
| | | | | | | at −80° C. |

### 4. Test Article and Ancillary Material Information

[0540] 4.1. Test Drug 1:
   [0541] 4.1.1. Identification: STP247G, construct B106-C5-30 (SEQ ID Nos. 2067-2068)
   [0542] 4.1.2. Manufacturer: Sirnaomics
   [0543] 4.1.3. Description: GalNAc-muRNA targeting human Complement C5/Factor B mRNAs
   [0544] 4.1.4. Lot/Batch Number: Will be recorded on study materials form.
   [0545] 4.1.5. Expiration Date: Will be recorded on study materials form.
   [0546] 4.1.6. Storage Temperature: 4° C.
   [0547] 4.1.7. Bio-Hazard Status: None
   [0548] 4.1.8. MSDS*: TBD
   [0549] 4.1.9. Appearance: Clear Liquid
   [0550] 4.1.10. Dose Information: See Table 1
   [0551] 4.1.11. Residual Test Article Storage: None

### 5. Technical and Analytical Procedures

### Treatment Procedure:

[0552] Procedure Description: Each animal will be injected subcutaneously in scruff with an injection volume of 200 uL according to study table 1. (Note: that the injection must be given subcutaneously. The test articles will not be functional if the subcutaneous site is missed, and injection is given within the muscular region or test articles are injected into the vein/bloodstream).

### Animal Euthanasia and Gross Necropsy

[0553] Blood Collection Prior to Necropsy:
   [0554] Prior to necropsy, the animals will be deeply anesthetized, and a terminal blood draw will be performed through the vena cava. Blood volume will be collected in a plasma separation tube. After separation the plasma sample will be split evenly into two labeled vials, flash frozen, and stored at −80° C.
[0555] Necropsy and Explant procedure:
   [0556] A 2 mm biopsy punch will be taken from the left, middle and right liver lobes. Place biopsy samples into separate 2 ml Eppendorf tubes, with 1.5 ml RNAlater and let soak for 15 minutes, flash freeze then store at −80° C. Three more 2 mm biopsy samples will be taken of the left, middle and right liver lobes all placed together into one 2 ml Eppendorf tubes, flash freeze then store at −80° C. Remaining liver will be flash frozen and stored in 10 mL conical tubes at −80° C.

### Results

[0557] Results are shown in FIGS. 16 and 17. Knockdown of the two targets (C5 and CFB) by the construct (B106-C5-30) have been determined 2, 4, 8 and 12 weeks after a single administration of 50 mg/kg of the indicated compound. Reported values are normalized to the mean of control mice (PBS).

[0558] Significant knockdown of the mRNA of either target could be demonstrated across several weeks.

The application's sequence listing, which the Patent Office published only in electronic form, follows.

SEQUENCE LISTING (2098 sequences)

SEQ ID NO: 1 - RNA, 19 nt, synthetic construct
  source 1..19: mol_type = other RNA
nagaaaacccaaatcctca

SEQ ID NO: 2 - RNA, 19 nt, synthetic construct
  source 1..19: mol_type = other RNA
nctgtctgatccatctagc

SEQ ID NO: 3 - RNA, 19 nt, synthetic construct
  source 1..19: mol_type = other RNA
naccatgccacagagactc

SEQ ID NO: 4 - RNA, 19 nt, synthetic construct
  source 1..19: mol_type = other RNA
natccatctagcaccaggt

SEQ ID NO: 5 - RNA, 19 nt, synthetic construct
  source 1..19: mol_type = other RNA
naaacccaaatcctcatct

SEQ ID NO: 6 - RNA, 19 nt, synthetic construct
  source 1..19: mol_type = other RNA
nccatctagcaccaggtag

SEQ ID NO: 7 - RNA, 19 nt, synthetic construct
  source 1..19: mol_type = other RNA
naaaacccaaatcctcatc

SEQ ID NO: 8 - RNA, 19 nt, synthetic construct
  source 1..19: mol_type = other RNA
ngtctgatccatctagcac

SEQ ID NO: 9 - RNA, 19 nt, synthetic construct
  source 1..19: mol_type = other RNA
nacccaaatcctcatcttg

SEQ ID NO: 10 - RNA, 19 nt, synthetic construct
  source 1..19: mol_type = other RNA
ntccatctagcaccaggta

SEQ ID NO: 11 - RNA, 19 nt, synthetic construct
  source 1..19: mol_type = other RNA
naacccaaatcctcatctt

SEQ ID NO: 12 - RNA, 19 nt, synthetic construct
  source 1..19: mol_type = other RNA
ncatgccacagagactcag

SEQ ID NO: 13 - RNA, 19 nt, synthetic construct
  source 1..19: mol_type = other RNA
ntgccacagagactcagag

SEQ ID NO: 14 - RNA, 19 nt, synthetic construct
  source 1..19: mol_type = other RNA
natgatgacatggcgggtg

SEQ ID NO: 15 - RNA, 19 nt, synthetic construct
  source 1..19: mol_type = other RNA
ntccatatccttgactttg

SEQ ID NO: 16 - RNA, 19 nt, synthetic construct
  source 1..19: mol_type = other RNA
nacaccaacttgaatgaaa

SEQ ID NO: 17 - RNA, 19 nt, synthetic construct
  source 1..19: mol_type = other RNA
ngccacagagactcagaga

SEQ ID NO: 18 - RNA, 19 nt, synthetic construct
  source 1..19: mol_type = other RNA
nccatgccacagagactca

SEQ ID NO: 19 - RNA, 19 nt, synthetic construct
  source 1..19: mol_type = other RNA
ncatctagcaccaggtaga

SEQ ID NO: 20 - RNA, 19 nt, synthetic construct
  source 1..19: mol_type = other RNA
nttccatatccttgacttt

SEQ ID NO: 21 - RNA, 19 nt, synthetic construct
  source 1..19: mol_type = other RNA
ngatccatctagcaccagg

SEQ ID NO: 22 - RNA, 19 nt, synthetic construct
  source 1..19: mol_type = other RNA
nccacagagactcagagac

SEQ ID NO: 23 - RNA, 19 nt, synthetic construct
  source 1..19: mol_type = other RNA
ntgatccatctagcaccag

SEQ ID NO: 24 - RNA, 19 nt, synthetic construct
  source 1..19: mol_type = other RNA
nacctccttccgagtcagc

SEQ ID NO: 25 - RNA, 19 nt, synthetic construct
  source 1..19: mol_type = other RNA
ntctgatccatctagcacc

SEQ ID NO: 26 - RNA, 19 nt, synthetic construct
  source 1..19: mol_type = other RNA
ntcttggcaggaaggctcc

SEQ ID NO: 27 - RNA, 19 nt, synthetic construct
  source 1..19: mol_type = other RNA
ntctagcaccaggtagatg

SEQ ID NO: 28 - RNA, 19 nt, synthetic construct
  source 1..19: mol_type = other RNA
naagtactcagacaccaca

SEQ ID NO: 29 - RNA, 19 nt, synthetic construct
  source 1..19: mol_type = other RNA
ntgtctgatccatctagca

SEQ ID NO: 30 - RNA, 19 nt, synthetic construct
  source 1..19: mol_type = other RNA
natctagcaccaggtagat

SEQ ID NO: 31 - RNA, 19 nt, synthetic construct
  source 1..19: mol_type = other RNA
ncaaatcctcatcttggag

SEQ ID NO: 32 - RNA, 19 nt, synthetic construct
  source 1..19: mol_type = other RNA
natagtcataaaattcagg

SEQ ID NO: 33 - RNA, 19 nt, synthetic construct
  source 1..19: mol_type = other RNA
naggatgatgacatggcgg

SEQ ID NO: 34 - RNA, 19 nt, synthetic construct
  source 1..19: mol_type = other RNA
ncaatctgtgttctggcac

SEQ ID NO: 35 - RNA, 19 nt, synthetic construct
  source 1..19: mol_type = other RNA
ntgagcttgatcagggcaa

SEQ ID NO: 36 - RNA, 19 nt, synthetic construct
  source 1..19: mol_type = other RNA
nagtggaaagagatctcat

SEQ ID NO: 37 - RNA, 19 nt, synthetic construct
  source 1..19: mol_type = other RNA
nagatgttcatggagcctg

SEQ ID NO: 38 - RNA, 19 nt, synthetic construct
  source 1..19: mol_type = other RNA
ngcaagtggtagttggagg

SEQ ID NO: 39 - RNA, 19 nt, synthetic construct
  source 1..19: mol_type = other RNA
ncacaccataacttgccac

SEQ ID NO: 40 - RNA, 19 nt, synthetic construct
  source 1..19: mol_type = other RNA
naaagagatctcatcactc

SEQ ID NO: 41 - RNA, 19 nt, synthetic construct
  source 1..19: mol_type = other RNA
ntcaacttgtggtcttcat

SEQ ID NO: 42 - RNA, 19 nt, synthetic construct
  source 1..19: mol_type = other RNA
naaacgacttctcttgtga

SEQ ID NO: 43 - RNA, 19 nt, synthetic construct
  source 1..19: mol_type = other RNA
ngtatgtggcatatgtcac

SEQ ID NO: 44 - RNA, 19 nt, synthetic construct
  source 1..19: mol_type = other RNA
ngtctttcttggaagccaa

SEQ ID NO: 45 - RNA, 19 nt, synthetic construct
  source 1..19: mol_type = other RNA
ncatccagataatcctccc

SEQ ID NO: 46 - RNA, 19 nt, synthetic construct
  source 1..19: mol_type = other RNA
nttgactttgtcatagcct

SEQ ID NO: 47 - RNA, 19 nt, synthetic construct
  source 1..19: mol_type = other RNA
naaactccagacctagacc

SEQ ID NO: 48 - RNA, 19 nt, synthetic construct
  source 1..19: mol_type = other RNA
nataacttgccaccttctc

SEQ ID NO: 49 - RNA, 19 nt, synthetic construct
  source 1..19: mol_type = other RNA
ncatagtcataaaattcag

SEQ ID NO: 50 - RNA, 19 nt, synthetic construct
  source 1..19: mol_type = other RNA
ntggctcctgtgaagttgc

SEQ ID NO: 51 - RNA, 19 nt, synthetic construct
  source 1..19: mol_type = other RNA
naaagtactcagacaccac

SEQ ID NO: 52 - RNA, 19 nt, synthetic construct
  source 1..19: mol_type = other RNA
ngctcattgtctttcttgg

SEQ ID NO: 53 - RNA, 19 nt, synthetic construct
  source 1..19: mol_type = other RNA
ntaaaattcaggaattcct

SEQ ID NO: 54 - RNA, 19 nt, synthetic construct
  source 1..19: mol_type = other RNA
ngagatcttggcctgccat

SEQ ID NO: 55 - RNA, 19 nt, synthetic construct
  source 1..19: mol_type = other RNA
ngagcatctctctcacagc

SEQ ID NO: 56 - RNA, 19 nt, synthetic construct
  source 1..19: mol_type = other RNA
naaccgtcatagcagtgga

SEQ ID NO: 57 - RNA, 19 nt, synthetic construct
  source 1..19: mol_type = other RNA
nagagctttgatatcctgt

SEQ ID NO: 58 - RNA, 19 nt, synthetic construct
  source 1..19: mol_type = other RNA
nacaatgtgctgctgtcag

SEQ ID NO: 59 - RNA, 19 nt, synthetic construct
  source 1..19: mol_type = other RNA
nggtacgggtagaagccag

SEQ ID NO: 60 - RNA, 19 nt, synthetic construct
  source 1..19: mol_type = other RNA
ncagacctagacctggtca

SEQ ID NO: 61 - RNA, 19 nt, synthetic construct
  source 1..19: mol_type = other RNA
nttctcttgtgaactatca

SEQ ID NO: 62 - RNA, 19 nt, synthetic construct
  source 1..19: mol_type = other RNA
nttcaggaattcctgcttc

SEQ ID NO: 63 - RNA, 19 nt, synthetic construct
  source 1..19: mol_type = other RNA
nccaggttttccatatcct

SEQ ID NO: 64 - RNA, 19 nt, synthetic construct
  source 1..19: mol_type = other RNA
ncaacttgaatgaaacgac

SEQ ID NO: 65 - RNA, 19 nt, synthetic construct
  source 1..19: mol_type = other RNA
ngtgctgctgtcagcacaa

SEQ ID NO: 66 - RNA, 19 nt, synthetic construct
  source 1..19: mol_type = other RNA
ngacctccttccgagtcag

SEQ ID NO: 67 - RNA, 19 nt, synthetic construct
  source 1..19: mol_type = other RNA
ncaattaagttgactagac

SEQ ID NO: 68 - RNA, 19 nt, synthetic construct
  source 1..19: mol_type = other RNA
ntgacacgttcgccgctgg

SEQ ID NO: 69 - RNA, 19 nt, synthetic construct
  source 1..19: mol_type = other RNA
ncattgtctttcttggaag

SEQ ID NO: 70 - RNA, 19 nt, synthetic construct
  source 1..19: mol_type = other RNA
nccaacttgaatgaaacga

SEQ ID NO: 71 - RNA, 19 nt, synthetic construct
  source 1..19: mol_type = other RNA
ncacaaagtactcagacac

SEQ ID NO: 72 - RNA, 19 nt, synthetic construct
  source 1..19: mol_type = other RNA
ntgcagtggtaggtgacgc

SEQ ID NO: 73 - RNA, 19 nt, synthetic construct
  source 1..19: mol_type = other RNA
ntcatgaggatgatgacat

SEQ ID NO: 74 - RNA, 19 nt, synthetic construct
  source 1..19: mol_type = other RNA
nttcaacttgtggtcttca

SEQ ID NO: 75 - RNA, 19 nt, synthetic construct
  source 1..19: mol_type = other RNA
ngtagttggaggaagcctc

SEQ ID NO: 76 - RNA, 19 nt, synthetic construct
  source 1..19: mol_type = other RNA
ncatgctgtacactgcctg

SEQ ID NO: 77 - RNA, 19 nt, synthetic construct
  source 1..19: mol_type = other RNA
ntgtctttcttggaagcca

SEQ ID NO: 78 - RNA, 19 nt, synthetic construct
  source 1..19: mol_type = other RNA
ncgactccttctatggtct

SEQ ID NO: 79 - RNA, 19 nt, synthetic construct
  source 1..19: mol_type = other RNA
ngacatccagataatcctc

SEQ ID NO: 80 - RNA, 19 nt, synthetic construct
  source 1..19: mol_type = other RNA
ntgagatcttggcctgcca

SEQ ID NO: 81 - RNA, 19 nt, synthetic construct
  source 1..19: mol_type = other RNA
nacgctgtcttcaaggcgg

SEQ ID NO: 82 - RNA, 19 nt, synthetic construct
  source 1..19: mol_type = other RNA
nagacaggaaagcttcggc

SEQ ID NO: 83 - RNA, 19 nt, synthetic construct
  source 1..19: mol_type = other RNA
nttgaacacatgttgctca

SEQ ID NO: 84 - RNA, 19 nt, synthetic construct
  source 1..19: mol_type = other RNA
nataaaattcaggaattcc

SEQ ID NO: 85 - RNA, 19 nt, synthetic construct
  source 1..19: mol_type = other RNA
ncccaaatcctcatcttgg

SEQ ID NO: 86 - RNA, 19 nt, synthetic construct
  source 1..19: mol_type = other RNA
naagagatctcatcactca

SEQ ID NO: 87 - RNA, 19 nt, synthetic construct
  source 1..19: mol_type = other RNA
naaagcattgatgttcact

SEQ ID NO: 88 - RNA, 19 nt, synthetic construct
  source 1..19: mol_type = other RNA
naggaattcctgcttcttt

SEQ ID NO: 89 - RNA, 19 nt, synthetic construct
  source 1..19: mol_type = other RNA
natgaaggagtcttggcag

SEQ ID NO: 90 - RNA, 19 nt, synthetic construct
  source 1..19: mol_type = other RNA
naagcttcggccacctctt

SEQ ID NO: 91 - RNA, 19 nt, synthetic construct
  source 1..19: mol_type = other RNA
ntgactttgtcatagcctg

SEQ ID NO: 92 - RNA, 19 nt, synthetic construct
  source 1..19: mol_type = other RNA
ntccaagctgaaactccag

SEQ ID NO: 93 - RNA, 19 nt, synthetic construct
  source 1..19: mol_type = other RNA
nccaaatcctcatcttgga

SEQ ID NO: 94 - RNA, 19 nt, synthetic construct
  source 1..19: mol_type = other RNA
ncagctgttttaattcaat

SEQ ID NO: 95 - RNA, 19 nt, synthetic construct
  source 1..19: mol_type = other RNA
naacgacttctcttgtgaa

SEQ ID NO: 96 - RNA, 19 nt, synthetic construct
  source 1..19: mol_type = other RNA
nccggaacatccaagcggg

SEQ ID NO: 97 - RNA, 19 nt, synthetic construct
  source 1..19: mol_type = other RNA
ncaaacacatagacatcca

SEQ ID NO: 98 - RNA, 19 nt, synthetic construct
  source 1..19: mol_type = other RNA
nttcacaccataacttgcc

SEQ ID NO: 99 - RNA, 19 nt, synthetic construct
  source 1..19: mol_type = other RNA
ntctcttgtgaactatcaa

SEQ ID NO: 100 - RNA, 19 nt, synthetic construct
  source 1..19: mol_type = other RNA
nattcaggaattcctgctt

SEQ ID NO: 101 - RNA, 19 nt, synthetic construct
  source 1..19: mol_type = other RNA
ngacactttgacccaaatt

SEQ ID NO: 102 - RNA, 19 nt, synthetic construct
  source 1..19: mol_type = other RNA
ncacaaacagagctttgat

SEQ ID NO: 103 - RNA, 19 nt, synthetic construct
  source 1..19: mol_type = other RNA
ncaaacagagctttgatat

SEQ ID NO: 104 - RNA, 19 nt, synthetic construct
  source 1..19: mol_type = other RNA
nttggagtttctccttcag

SEQ ID NO: 105 - RNA, 19 nt, synthetic construct
  source 1..19: mol_type = other RNA
ntcacaccataacttgcca

SEQ ID NO: 106 - RNA, 19 nt, synthetic construct
  source 1..19: mol_type = other RNA
ntgaatgaaacgacttctc

SEQ ID NO: 107 - RNA, 19 nt, synthetic construct
  source 1..19: mol_type = other RNA
ncaggttttccatatcctt

SEQ ID NO: 108 - RNA, 19 nt, synthetic construct
  source 1..19: mol_type = other RNA
ngcatctctctcacagctg

SEQ ID NO: 109 - RNA, 19 nt, synthetic construct
  source 1..19: mol_type = other RNA
nacatccagataatcctcc

SEQ ID NO: 110 - RNA, 19 nt, synthetic construct
  source 1..19: mol_type = other RNA
ncgagttgttccctcggtg

SEQ ID NO: 111 - RNA, 19 nt, synthetic construct
  source 1..19: mol_type = other RNA
nacacatgttgctcattgt

SEQ ID NO: 112 - RNA, 19 nt, synthetic construct
  source 1..19: mol_type = other RNA
ntctcaattaagttgacta

SEQ ID NO: 113 - RNA, 19 nt, synthetic construct
  source 1..19: mol_type = other RNA
ngaagccaaagcattgatg

SEQ ID NO: 114 - RNA, 19 nt, synthetic construct
  source 1..19: mol_type = other RNA
ngcagtggaaagagatctc

SEQ ID NO: 115 - RNA, 19 nt, synthetic construct
  source 1..19: mol_type = other RNA
nacactgcctggagggcct

SEQ ID NO: 116 - RNA, 19 nt, synthetic construct
  source 1..19: mol_type = other RNA
ntagacctggtcacattcc

SEQ ID NO: 117 - RNA, 19 nt, synthetic construct
  source 1..19: mol_type = other RNA
ncagacacaaacagagctt

SEQ ID NO: 118 - RNA, 19 nt, synthetic construct
  source 1..19: mol_type = other RNA
ngagtttctccttcagcca

SEQ ID NO: 119 - RNA, 19 nt, synthetic construct
  source 1..19: mol_type = other RNA
natgtgctgctgtcagcac

SEQ ID NO: 120 - RNA, 19 nt, synthetic construct
  source 1..19: mol_type = other RNA
ncagagctttgatatcctg

SEQ ID NO: 121 - RNA, 19 nt, synthetic construct
  source 1..19: mol_type = other RNA
ngatatcctgtgcagggag

SEQ ID NO: 122 - RNA, 19 nt, synthetic construct
  source 1..19: mol_type = other RNA
nagggcaacgtcatagtca

SEQ ID NO: 123 - RNA, 19 nt, synthetic construct
  source 1..19: mol_type = other RNA
nagacctagacctggtcac

SEQ ID NO: 124 - RNA, 19 nt, synthetic construct
  source 1..19: mol_type = other RNA
nagtactcagacaccacag

SEQ ID NO: 125 - RNA, 19 nt, synthetic construct
  source 1..19: mol_type = other RNA
naaggctccgtcccgctcc

SEQ ID NO: 126 - RNA, 19 nt, synthetic construct
  source 1..19: mol_type = other RNA
ngggcaacgtcatagtcat

SEQ ID NO: 127 - RNA, 19 nt, synthetic construct
  source 1..19: mol_type = other RNA
nctgttttaattcaatccc

SEQ ID NO: 128 - RNA, 19 nt, synthetic construct
  source 1..19: mol_type = other RNA
nagagatctcatcactcac

SEQ ID NO: 129 - RNA, 19 nt, synthetic construct
  source 1..19: mol_type = other RNA
nggtcttcataattgattt

SEQ ID NO: 130 - RNA, 19 nt, synthetic construct
  source 1..19: mol_type = other RNA
ncatatcttggcttcacac

SEQ ID NO: 131 - RNA, 19 nt, synthetic construct
  source 1..19: mol_type = other RNA
ncaccaacttgaatgaaac

SEQ ID NO: 132 - RNA, 19 nt, synthetic construct
  source 1..19: mol_type = other RNA
nagctgttttaattcaatc

SEQ ID NO: 133 - RNA, 19 nt, synthetic construct
  source 1..19: mol_type = other RNA
ntaacttgccaccttctca

SEQ ID NO: 134 - RNA, 19 nt, synthetic construct
  source 1..19: mol_type = other RNA
ntgagcaggtacctgcttt

SEQ ID NO: 135 - RNA, 19 nt, synthetic construct
  source 1..19: mol_type = other RNA
nttgatgtagacctccttc

SEQ ID NO: 136 - RNA, 19 nt, synthetic construct
  source 1..19: mol_type = other RNA
nggcaagtggtagttggag

SEQ ID NO: 137 - RNA, 19 nt, synthetic construct
  source 1..19: mol_type = other RNA
nggaagcctcaaagctcga

SEQ ID NO: 138 - RNA, 19 nt, synthetic construct
  source 1..19: mol_type = other RNA
naatgacagtaattgggtc

SEQ ID NO: 139 - RNA, 19 nt, synthetic construct
  source 1..19: mol_type = other RNA
ntttgaacacatgttgctc

SEQ ID NO: 140 - RNA, 19 nt, synthetic construct
  source 1..19: mol_type = other RNA
naaatcctcatcttggagt

SEQ ID NO: 141 - RNA, 19 nt, synthetic construct
  source 1..19: mol_type = other RNA
nggagtttctccttcagcc

SEQ ID NO: 142 - RNA, 19 nt, synthetic construct
  source 1..19: mol_type = other RNA
ncataacttgccaccttct

SEQ ID NO: 143 - RNA, 19 nt, synthetic construct
  source 1..19: mol_type = other RNA
ngctgttttaattcaatcc

SEQ ID NO: 144 - RNA, 19 nt, synthetic construct
  source 1..19: mol_type = other RNA
naagctcgagttgttccct

SEQ ID NO: 145 - RNA, 19 nt, synthetic construct
  source 1..19: mol_type = other RNA
nggcaacgtcatagtcata

SEQ ID NO: 146 - RNA, 19 nt, synthetic construct
  source 1..19: mol_type = other RNA
nttccaggttttccatatc

SEQ ID NO: 147 - RNA, 19 nt, synthetic construct
  source 1..19: mol_type = other RNA
ntccaggttttccatatcc

SEQ ID NO: 148 - RNA, 19 nt, synthetic construct
  source 1..19: mol_type = other RNA
nccatgttgtgcaatccat

SEQ ID NO: 149 - RNA, 19 nt, synthetic construct
  source 1..19: mol_type = other RNA
ncatatccttgactttgaa

SEQ ID NO: 150 - RNA, 19 nt, synthetic construct
  source 1..19: mol_type = other RNA
ntgactttgaacacatgtt

SEQ ID NO: 151 - RNA, 19 nt, synthetic construct
  source 1..19: mol_type = other RNA
nctcatcttggagtttctc

SEQ ID NO: 152 - RNA, 19 nt, synthetic construct
  source 1..19: mol_type = other RNA
ncatgttgctcattgtctt

SEQ ID NO: 153 - RNA, 19 nt, synthetic construct
  source 1..19: mol_type = other RNA
naccaacttgaatgaaacg

SEQ ID NO: 154 - RNA, 19 nt, synthetic construct
  source 1..19: mol_type = other RNA
nacagatcgctgtctgccc

SEQ ID NO: 155 - RNA, 19 nt, synthetic construct
  source 1..19: mol_type = other RNA
ntcacagctgcctttctta

SEQ ID NO: 156 - RNA, 19 nt, synthetic construct
  source 1..19: mol_type = other RNA
nggccgccagaatcacctc

SEQ ID NO: 157 - RNA, 19 nt, synthetic construct
  source 1..19: mol_type = other RNA
nccaagctgaaactccaga

SEQ ID NO: 158 - RNA, 19 nt, synthetic construct
  source 1..19: mol_type = other RNA
nttgatcagggcaacgtca

SEQ ID NO: 159 - RNA, 19 nt, synthetic construct
  source 1..19: mol_type = other RNA
ngttcccaaaccatgccac

SEQ ID NO: 160 - RNA, 19 nt, synthetic construct
  source 1..19: mol_type = other RNA
nacctgcttttgccgcttc

SEQ ID NO: 161 - RNA, 19 nt, synthetic construct
  source 1..19: mol_type = other RNA
nttgctcattgtctttctt

SEQ ID NO: 162 - RNA, 19 nt, synthetic construct
  source 1..19: mol_type = other RNA
ncacgttcgccgctgggag

SEQ ID NO: 163 - RNA, 19 nt, synthetic construct
  source 1..19: mol_type = other RNA
ncattcttgatgtagacct

SEQ ID NO: 164 - RNA, 19 nt, synthetic construct
  source 1..19: mol_type = other RNA
nttgagcttgatcagggca

SEQ ID NO: 165 - RNA, 19 nt, synthetic construct
  source 1..19: mol_type = other RNA
nattcttgatgtagacctc

SEQ ID NO: 166 - RNA, 19 nt, synthetic construct
  source 1..19: mol_type = other RNA
ntgaaggagtcttggcagg

SEQ ID NO: 167 - RNA, 19 nt, synthetic construct
  source 1..19: mol_type = other RNA
nttggcttcacaccataac

SEQ ID NO: 168 - RNA, 19 nt, synthetic construct
  source 1..19: mol_type = other RNA
natcttggcttcacaccat

SEQ ID NO: 169 - RNA, 19 nt, synthetic construct
  source 1..19: mol_type = other RNA
nctcacagctgcctttctt

SEQ ID NO: 170 - RNA, 19 nt, synthetic construct
  source 1..19: mol_type = other RNA
nccaatgctgtctgatcca

SEQ ID NO: 171 - RNA, 19 nt, synthetic construct
  source 1..19: mol_type = other RNA
ngagtggtggtcacacctc

SEQ ID NO: 172 - RNA, 19 nt, synthetic construct
  source 1..19: mol_type = other RNA
natagggactcactcctcc

SEQ ID NO: 173 - RNA, 19 nt, synthetic construct
  source 1..19: mol_type = other RNA
nctgacttcaacttgtggt

SEQ ID NO: 174 - RNA, 19 nt, synthetic construct
  source 1..19: mol_type = other RNA
nttctcaattaagttgact

SEQ ID NO: 175 - RNA, 19 nt, synthetic construct
  source 1..19: mol_type = other RNA
nagtttctccttcagccag

SEQ ID NO: 176 - RNA, 19 nt, synthetic construct
  source 1..19: mol_type = other RNA
nagctttgatatcctgtgc

SEQ ID NO: 177 - RNA, 19 nt, synthetic construct
  source 1..19: mol_type = other RNA
ntgtccttgactttgtcat

SEQ ID NO: 178 - RNA, 19 nt, synthetic construct
  source 1..19: mol_type = other RNA
ncaggtacgtgtctgcaca

SEQ ID NO: 179 - RNA, 19 nt, synthetic construct
  source 1..19: mol_type = other RNA
naaacaatgtgctgctgtc

SEQ ID NO: 180 - RNA, 19 nt, synthetic construct
  source 1..19: mol_type = other RNA
natatcctgtgcagggagc

SEQ ID NO: 181 - RNA, 19 nt, synthetic construct
  source 1..19: mol_type = other RNA
ngactcagagactggcttt

SEQ ID NO: 182 - RNA, 19 nt, synthetic construct
  source 1..19: mol_type = other RNA
ncaatgacagtaattgggt

SEQ ID NO: 183 - RNA, 19 nt, synthetic construct
  source 1..19: mol_type = other RNA
ngagccaccttcctgacac

SEQ ID NO: 184 - RNA, 19 nt, synthetic construct
  source 1..19: mol_type = other RNA
ncttgactttgaacacatg

SEQ ID NO: 185 - RNA, 19 nt, synthetic construct
  source 1..19: mol_type = other RNA
natgaaacgacttctcttg

SEQ ID NO: 186 - RNA, 19 nt, synthetic construct
  source 1..19: mol_type = other RNA
ngaagacaggaaagcttcg

SEQ ID NO: 187 - RNA, 19 nt, synthetic construct
  source 1..19: mol_type = other RNA
ngctttgatatcctgtgca

SEQ ID NO: 188 - RNA, 19 nt, synthetic construct
  source 1..19: mol_type = other RNA
ntcttgagcttgatcaggg

SEQ ID NO: 189 - RNA, 19 nt, synthetic construct
  source 1..19: mol_type = other RNA
nggattgctctgcactctg

SEQ ID NO: 190 - RNA, 19 nt, synthetic construct
  source 1..19: mol_type = other RNA
ncatattgagcatctctct

SEQ ID NO: 191 - RNA, 19 nt, synthetic construct
  source 1..19: mol_type = other RNA
natccttgactttgaacac

SEQ ID NO: 192 - RNA, 19 nt, synthetic construct
  source 1..19: mol_type = other RNA
ngcagacatccactactcc

SEQ ID NO: 193 - RNA, 19 nt, synthetic construct
  source 1..19: mol_type = other RNA
nagacctccttccgagtca

SEQ ID NO: 194 - RNA, 19 nt, synthetic construct
  source 1..19: mol_type = other RNA
naccttctcaattaagttg

SEQ ID NO: 195 - RNA, 19 nt, synthetic construct
  source 1..19: mol_type = other RNA
nagaagtcggaaggagccg

SEQ ID NO: 196 - RNA, 19 nt, synthetic construct
  source 1..19: mol_type = other RNA
ntgcacagggtacgggtag

SEQ ID NO: 197 - RNA, 19 nt, synthetic construct
  source 1..19: mol_type = other RNA
natgacagtaattgggtcc

SEQ ID NO: 198 - RNA, 19 nt, synthetic construct
  source 1..19: mol_type = other RNA
ngttagtccctgacttcaa

SEQ ID NO: 199 - RNA, 19 nt, synthetic construct
  source 1..19: mol_type = other RNA
natatccttgactttgaac

SEQ ID NO: 200 - RNA, 19 nt, synthetic construct
  source 1..19: mol_type = other RNA
ngtacgtgtctgcacaggg

SEQ ID NO: 201 - RNA, 19 nt, synthetic construct
  source 1..19: mol_type = other RNA
ngtcagcacaaagtactca

SEQ ID NO: 202 - RNA, 19 nt, synthetic construct
  source 1..19: mol_type = other RNA
ntggtcttcataattgatt

SEQ ID NO: 203 - RNA, 19 nt, synthetic construct
  source 1..19: mol_type = other RNA
ncagagactcagagactgg

SEQ ID NO: 204 - RNA, 19 nt, synthetic construct
  source 1..19: mol_type = other RNA
ntagacatccagataatcc

SEQ ID NO: 205 - RNA, 19 nt, synthetic construct
  source 1..19: mol_type = other RNA
nctccttccgagtcagctt

SEQ ID NO: 206 - RNA, 19 nt, synthetic construct
  source 1..19: mol_type = other RNA
ncatggagcctgaagggtc

SEQ ID NO: 207 - RNA, 19 nt, synthetic construct
  source 1..19: mol_type = other RNA
ntggcatatgtcactagac

SEQ ID NO: 208 - RNA, 19 nt, synthetic construct
  source 1..19: mol_type = other RNA
naagcattgatgttcactt

SEQ ID NO: 209 - RNA, 19 nt, synthetic construct
  source 1..19: mol_type = other RNA
nctcactcctccagtacaa

SEQ ID NO: 210 - RNA, 19 nt, synthetic construct
  source 1..19: mol_type = other RNA
ngatgtccttgactttgtc

SEQ ID NO: 211 - RNA, 19 nt, synthetic construct
  source 1..19: mol_type = other RNA
ntgttttaattcaatccca

SEQ ID NO: 212 - RNA, 19 nt, synthetic construct
  source 1..19: mol_type = other RNA
ntagatgttcatggagcct

SEQ ID NO: 213 - RNA, 19 nt, synthetic construct
  source 1..19: mol_type = other RNA
natagcagtggaaagagat

SEQ ID NO: 214 - RNA, 19 nt, synthetic construct
  source 1..19: mol_type = other RNA
ncattcacttggcaggtgc

SEQ ID NO: 215 - RNA, 19 nt, synthetic construct
  source 1..19: mol_type = other RNA
nattgatgttcacttggtt

SEQ ID NO: 216 - RNA, 19 nt, synthetic construct
  source 1..19: mol_type = other RNA
ncagccagggcagcacttg

SEQ ID NO: 217 - RNA, 19 nt, synthetic construct
  source 1..19: mol_type = other RNA
nctcagtgtccaagctgaa

SEQ ID NO: 218 - RNA, 19 nt, synthetic construct
  source 1..19: mol_type = other RNA
ncagagactggctttcatc

SEQ ID NO: 219 - RNA, 19 nt, synthetic construct
  source 1..19: mol_type = other RNA
natccagataatcctccct

SEQ ID NO: 220 - RNA, 19 nt, synthetic construct
  source 1..19: mol_type = other RNA
ncttctcaattaagttgac

SEQ ID NO: 221 - RNA, 19 nt, synthetic construct
  source 1..19: mol_type = other RNA
nccagacctagacctggtc

SEQ ID NO: 222 - RNA, 19 nt, synthetic construct
  source 1..19: mol_type = other RNA
ncaacgtcatagtcataaa

SEQ ID NO: 223 - RNA, 19 nt, synthetic construct
  source 1..19: mol_type = other RNA
nttgaatgaaacgacttct

SEQ ID NO: 224 - RNA, 19 nt, synthetic construct
  source 1..19: mol_type = other RNA
ncctcctcagacacaaaca

SEQ ID NO: 225 - RNA, 19 nt, synthetic construct
  source 1..19: mol_type = other RNA
naagccaaagcattgatgt

SEQ ID NO: 226 - RNA, 19 nt, synthetic construct
  source 1..19: mol_type = other RNA
ntgaaacgacttctcttgt

SEQ ID NO: 227 - RNA, 19 nt, synthetic construct
  source 1..19: mol_type = other RNA
naacttgtggtcttcataa

SEQ ID NO: 228 - RNA, 19 nt, synthetic construct
  source 1..19: mol_type = other RNA
nccaggtagatgttcatgg

SEQ ID NO: 229 - RNA, 19 nt, synthetic construct
  source 1..19: mol_type = other RNA
nctgtgttctggcacctgc

SEQ ID NO: 230 - RNA, 19 nt, synthetic construct
  source 1..19: mol_type = other RNA
naacttgccaccttctcaa

SEQ ID NO: 231 - RNA, 19 nt, synthetic construct
  source 1..19: mol_type = other RNA
ngccatggttgcttgtggt

SEQ ID NO: 232 - RNA, 19 nt, synthetic construct
  source 1..19: mol_type = other RNA
ngacaaatgggcctgatag

SEQ ID NO: 233 - RNA, 19 nt, synthetic construct
  source 1..19: mol_type = other RNA
naagttgactagacacttt

SEQ ID NO: 234 - RNA, 19 nt, synthetic construct
  source 1..19: mol_type = other RNA
ncatggcgggtgcggttcc

SEQ ID NO: 235 - RNA, 19 nt, synthetic construct
  source 1..19: mol_type = other RNA
nccggatctcatcaatgac

SEQ ID NO: 236 - RNA, 19 nt, synthetic construct
  source 1..19: mol_type = other RNA
ngaggaagcctcaaagctc

SEQ ID NO: 237 - RNA, 19 nt, synthetic construct
  source 1..19: mol_type = other RNA
nactttgaacacatgttgc

SEQ ID NO: 238 - RNA, 19 nt, synthetic construct
  source 1..19: mol_type = other RNA
nctcctcctcagacacaaa

SEQ ID NO: 239 - RNA, 19 nt, synthetic construct
  source 1..19: mol_type = other RNA
naggaaggctccgtcccgc

SEQ ID NO: 240 - RNA, 19 nt, synthetic construct
  source 1..19: mol_type = other RNA
ncgccagaatcacctctgc

SEQ ID NO: 241 - RNA, 19 nt, synthetic construct
  source 1..19: mol_type = other RNA
nggaaagagatctcatcac

SEQ ID NO: 242 - RNA, 19 nt, synthetic construct
  source 1..19: mol_type = other RNA
naagtcccggatctcatca

SEQ ID NO: 243 - RNA, 19 nt, synthetic construct
  source 1..19: mol_type = other RNA
ngagcttgatcagggcaac

SEQ ID NO: 244 - RNA, 19 nt, synthetic construct
  source 1..19: mol_type = other RNA
ngttgctcattgtctttct

SEQ ID NO: 245 - RNA, 19 nt, synthetic construct
  source 1..19: mol_type = other RNA
ntgcttgtggtaatcggta

SEQ ID NO: 246 - RNA, 19 nt, synthetic construct
  source 1..19: mol_type = other RNA
ntcatcactcacattgtag

SEQ ID NO: 247 - RNA, 19 nt, synthetic construct
  source 1..19: mol_type = other RNA
ncagtgtccaagctgaaac

SEQ ID NO: 248 - RNA, 19 nt, synthetic construct
  source 1..19: mol_type = other RNA
nccattcttgatgtagacc

SEQ ID NO: 249 - RNA, 19 nt, synthetic construct
  source 1..19: mol_type = other RNA
naacaatgtgctgctgtca

SEQ ID NO: 250 - RNA, 19 nt, synthetic construct
  source 1..19: mol_type = other RNA
ngacttcaacttgtggtct

SEQ ID NO: 251 - RNA, 19 nt, synthetic construct
  source 1..19: mol_type = other RNA
ntgccacagagactcagag

SEQ ID NO: 252 - RNA, 19 nt, synthetic construct
  source 1..19: mol_type = other RNA
ntgaatgaaacgacttctc

SEQ ID NO: 253 - RNA, 15 nt, synthetic construct
  source 1..15: mol_type = other RNA
gatttgggttttcta

SEQ ID NO: 254 - RNA, 15 nt, synthetic construct
  source 1..15: mol_type = other RNA
gatggatcagacagc

SEQ ID NO: 255 - RNA, 15 nt, synthetic construct
  source 1..15: mol_type = other RNA
ctctgtggcatggtt

SEQ ID NO: 256 - RNA, 15 nt, synthetic construct
  source 1..15: mol_type = other RNA
ggtgctagatggatc

SEQ ID NO: 257 - RNA, 15 nt, synthetic construct
  source 1..15: mol_type = other RNA
gaggatttgggtttt

SEQ ID NO: 258 - RNA, 15 nt, synthetic construct
  source 1..15: mol_type = other RNA
ctggtgctagatgga

SEQ ID NO: 259 - RNA, 15 nt, synthetic construct
  source 1..15: mol_type = other RNA
aggatttgggttttc

SEQ ID NO: 260 - RNA, 15 nt, synthetic construct
  source 1..15: mol_type = other RNA
tagatggatcagaca

SEQ ID NO: 261 - RNA, 15 nt, synthetic construct
  source 1..15: mol_type = other RNA
atgaggatttgggtt

SEQ ID NO: 262 - RNA, 15 nt, synthetic construct
  source 1..15: mol_type = other RNA
tggtgctagatggat

SEQ ID NO: 263 - RNA, 15 nt, synthetic construct
  source 1..15: mol_type = other RNA
tgaggatttgggttt

SEQ ID NO: 264 - RNA, 15 nt, synthetic construct
  source 1..15: mol_type = other RNA
gtctctgtggcatgg

SEQ ID NO: 265 - RNA, 15 nt, synthetic construct
  source 1..15: mol_type = other RNA
gagtctctgtggcat

SEQ ID NO: 266 - RNA, 15 nt, synthetic construct
  source 1..15: mol_type = other RNA
cgccatgtcatcatc

SEQ ID NO: 267 - RNA, 15 nt, synthetic construct
  source 1..15: mol_type = other RNA
gtcaaggatatggaa

SEQ ID NO: 268 - RNA, 15 nt, synthetic construct
  source 1..15: mol_type = other RNA
attcaagttggtgta

SEQ ID NO: 269 - RNA, 15 nt, synthetic construct
  source 1..15: mol_type = other RNA
tgagtctctgtggca

SEQ ID NO: 270 - RNA, 15 nt, synthetic construct
  source 1..15: mol_type = other RNA
tctctgtggcatggt

SEQ ID NO: 271 - RNA, 15 nt, synthetic construct
  source 1..15: mol_type = other RNA
cctggtgctagatgg

SEQ ID NO: 272 - RNA, 15 nt, synthetic construct
  source 1..15: mol_type = other RNA
tcaaggatatggaaa

SEQ ID NO: 273 - RNA, 15 nt, synthetic construct
  source 1..15: mol_type = other RNA
gtgctagatggatca

SEQ ID NO: 274 - RNA, 15 nt, synthetic construct
  source 1..15: mol_type = other RNA
ctgagtctctgtggc

SEQ ID NO: 275 - RNA, 15 nt, synthetic construct
  source 1..15: mol_type = other RNA
tgctagatggatcag

SEQ ID NO: 276 - RNA, 15 nt, synthetic construct
  source 1..15: mol_type = other RNA
actcggaaggaggtc

SEQ ID NO: 277 - RNA, 15 nt, synthetic construct
  source 1..15: mol_type = other RNA
ctagatggatcagac

SEQ ID NO: 278 - RNA, 15 nt, synthetic construct
  source 1..15: mol_type = other RNA
ccttcctgccaagac

SEQ ID NO: 279 - RNA, 15 nt, synthetic construct
  source 1..15: mol_type = other RNA
tacctggtgctagat

SEQ ID NO: 280 - RNA, 15 nt, synthetic construct
  source 1..15: mol_type = other RNA
gtgtctgagtacttt

SEQ ID NO: 281 - RNA, 15 nt, synthetic construct
  source 1..15: mol_type = other RNA
agatggatcagacag

SEQ ID NO: 282 - RNA, 15 nt, synthetic construct
  source 1..15: mol_type = other RNA
acctggtgctagatg

SEQ ID NO: 283 - RNA, 15 nt, synthetic construct
  source 1..15: mol_type = other RNA
aagatgaggatttgg

SEQ ID NO: 284 - RNA, 15 nt, synthetic construct
  source 1..15: mol_type = other RNA
aattttatgactatg

SEQ ID NO: 285 - RNA, 15 nt, synthetic construct
  source 1..15: mol_type = other RNA
catgtcatcatcctc

SEQ ID NO: 286 - RNA, 15 nt, synthetic construct
  source 1..15: mol_type = other RNA
cagaacacagattgt

SEQ ID NO: 287 - RNA, 15 nt, synthetic construct
  source 1..15: mol_type = other RNA
cctgatcaagctcaa

SEQ ID NO: 288 - RNA, 15 nt, synthetic construct
  source 1..15: mol_type = other RNA
gatctctttccactg

SEQ ID NO: 289 - RNA, 15 nt, synthetic construct
  source 1..15: mol_type = other RNA
ctccatgaacatcta

SEQ ID NO: 290 - RNA, 15 nt, synthetic construct
  source 1..15: mol_type = other RNA
caactaccacttgcc

SEQ ID NO: 291 - RNA, 15 nt, synthetic construct
  source 1..15: mol_type = other RNA
caagttatggtgtga

SEQ ID NO: 292 - RNA, 15 nt, synthetic construct
  source 1..15: mol_type = other RNA
gatgagatctctttc

SEQ ID NO: 293 - RNA, 15 nt, synthetic construct
  source 1..15: mol_type = other RNA
agaccacaagttgaa

SEQ ID NO: 294 - RNA, 15 nt, synthetic construct
  source 1..15: mol_type = other RNA
aagagaagtcgtttc

SEQ ID NO: 295 - RNA, 15 nt, synthetic construct
  source 1..15: mol_type = other RNA
catatgccacatacc

SEQ ID NO: 296 - RNA, 15 nt, synthetic construct
  source 1..15: mol_type = other RNA
cttccaagaaagaca

SEQ ID NO: 297 - RNA, 15 nt, synthetic construct
  source 1..15: mol_type = other RNA
ggattatctggatgt

SEQ ID NO: 298 - RNA, 15 nt, synthetic construct
  source 1..15: mol_type = other RNA
tatgacaaagtcaag

SEQ ID NO: 299 - RNA, 15 nt, synthetic construct
  source 1..15: mol_type = other RNA
taggtctggagtttc

SEQ ID NO: 300 - RNA, 15 nt, synthetic construct
  source 1..15: mol_type = other RNA
aggtggcaagttatg

SEQ ID NO: 301 - RNA, 15 nt, synthetic construct
  source 1..15: mol_type = other RNA
attttatgactatga

SEQ ID NO: 302 - RNA, 15 nt, synthetic construct
  source 1..15: mol_type = other RNA
cttcacaggagccaa

SEQ ID NO: 303 - RNA, 15 nt, synthetic construct
  source 1..15: mol_type = other RNA
tgtctgagtactttg

SEQ ID NO: 304 - RNA, 15 nt, synthetic construct
  source 1..15: mol_type = other RNA
gaaagacaatgagca

SEQ ID NO: 305 - RNA, 15 nt, synthetic construct
  source 1..15: mol_type = other RNA
attcctgaattttat

SEQ ID NO: 306 - RNA, 15 nt, synthetic construct
  source 1..15: mol_type = other RNA
caggccaagatctca

SEQ ID NO: 307 - RNA, 15 nt, synthetic construct
  source 1..15: mol_type = other RNA
tgagagagatgctca

SEQ ID NO: 308 - RNA, 15 nt, synthetic construct
  source 1..15: mol_type = other RNA
ctgctatgacggtta

SEQ ID NO: 309 - RNA, 15 nt, synthetic construct
  source 1..15: mol_type = other RNA
gatatcaaagctctg

SEQ ID NO: 310 - RNA, 15 nt, synthetic construct
  source 1..15: mol_type = other RNA
cagcagcacattgtt

SEQ ID NO: 311 - RNA, 15 nt, synthetic construct
  source 1..15: mol_type = other RNA
cttctacccgtaccc

SEQ ID NO: 312 - RNA, 15 nt, synthetic construct
  source 1..15: mol_type = other RNA
caggtctaggtctgg

SEQ ID NO: 313 - RNA, 15 nt, synthetic construct
  source 1..15: mol_type = other RNA
agttcacaagagaag

SEQ ID NO: 314 - RNA, 15 nt, synthetic construct
  source 1..15: mol_type = other RNA
caggaattcctgaat

SEQ ID NO: 315 - RNA, 15 nt, synthetic construct
  source 1..15: mol_type = other RNA
tatggaaaacctgga

SEQ ID NO: 316 - RNA, 15 nt, synthetic construct
  source 1..15: mol_type = other RNA
tttcattcaagttgg

SEQ ID NO: 317 - RNA, 15 nt, synthetic construct
  source 1..15: mol_type = other RNA
gctgacagcagcaca

SEQ ID NO: 318 - RNA, 15 nt, synthetic construct
  source 1..15: mol_type = other RNA
ctcggaaggaggtct

SEQ ID NO: 319 - RNA, 15 nt, synthetic construct
  source 1..15: mol_type = other RNA
agtcaacttaattga

SEQ ID NO: 320 - RNA, 15 nt, synthetic construct
  source 1..15: mol_type = other RNA
cggcgaacgtgtcag

SEQ ID NO: 321 - RNA, 15 nt, synthetic construct
  source 1..15: mol_type = other RNA
caagaaagacaatga

SEQ ID NO: 322 - RNA, 15 nt, synthetic construct
  source 1..15: mol_type = other RNA
ttcattcaagttggt

SEQ ID NO: 323 - RNA, 15 nt, synthetic construct
  source 1..15: mol_type = other RNA
ctgagtactttgtgc

SEQ ID NO: 324 - RNA, 15 nt, synthetic construct
  source 1..15: mol_type = other RNA
cacctaccactgcag

SEQ ID NO: 325 - RNA, 15 nt, synthetic construct
  source 1..15: mol_type = other RNA
catcatcctcatgac

SEQ ID NO: 326 - RNA, 15 nt, synthetic construct
  source 1..15: mol_type = other RNA
gaccacaagttgaag

SEQ ID NO: 327 - RNA, 15 nt, synthetic construct
  source 1..15: mol_type = other RNA
cttcctccaactacc

SEQ ID NO: 328 - RNA, 15 nt, synthetic construct
  source 1..15: mol_type = other RNA
cagtgtacagcatga

SEQ ID NO: 329 - RNA, 15 nt, synthetic construct
  source 1..15: mol_type = other RNA
ttccaagaaagacaa

SEQ ID NO: 330 - RNA, 15 nt, synthetic construct
  source 1..15: mol_type = other RNA
catagaaggagtcga

SEQ ID NO: 331 - RNA, 15 nt, synthetic construct
  source 1..15: mol_type = other RNA
attatctggatgtct

SEQ ID NO: 332 - RNA, 15 nt, synthetic construct
  source 1..15: mol_type = other RNA
aggccaagatctcag

SEQ ID NO: 333 - RNA, 15 nt, synthetic construct
  source 1..15: mol_type = other RNA
cttgaagacagcgtc

SEQ ID NO: 334 - RNA, 15 nt, synthetic construct
  source 1..15: mol_type = other RNA
aagctttcctgtctt

SEQ ID NO: 335 - RNA, 15 nt, synthetic construct
  source 1..15: mol_type = other RNA
caacatgtgttcaaa

SEQ ID NO: 336 - RNA, 15 nt, synthetic construct
  source 1..15: mol_type = other RNA
ttcctgaattttatg

SEQ ID NO: 337 - RNA, 15 nt, synthetic construct
  source 1..15: mol_type = other RNA
gatgaggatttgggt

SEQ ID NO: 338 - RNA, 15 nt, synthetic construct
  source 1..15: mol_type = other RNA
tgatgagatctcttt

SEQ ID NO: 339 - RNA, 15 nt, synthetic construct
  source 1..15: mol_type = other RNA
aacatcaatgctttg

SEQ ID NO: 340 - RNA, 15 nt, synthetic construct
  source 1..15: mol_type = other RNA
aagcaggaattcctg

SEQ ID NO: 341 - RNA, 15 nt, synthetic construct
  source 1..15: mol_type = other RNA
caagactccttcatg

SEQ ID NO: 342 - RNA, 15 nt, synthetic construct
  source 1..15: mol_type = other RNA
ggtggccgaagcttt

SEQ ID NO: 343 - RNA, 15 nt, synthetic construct
  source 1..15: mol_type = other RNA
ctatgacaaagtcaa

SEQ ID NO: 344 - RNA, 15 nt, synthetic construct
  source 1..15: mol_type = other RNA
agtttcagcttggac

SEQ ID NO: 345 - RNA, 15 nt, synthetic construct
  source 1..15: mol_type = other RNA
agatgaggatttggg

SEQ ID NO: 346 - RNA, 15 nt, synthetic construct
  source 1..15: mol_type = other RNA
aattaaaacagctgc

SEQ ID NO: 347 - RNA, 15 nt, synthetic construct
  source 1..15: mol_type = other RNA
caagagaagtcgttt

SEQ ID NO: 348 - RNA, 15 nt, synthetic construct
  source 1..15: mol_type = other RNA
cttggatgttccggg

SEQ ID NO: 349 - RNA, 15 nt, synthetic construct
  source 1..15: mol_type = other RNA
tgtctatgtgtttgg

SEQ ID NO: 350 - RNA, 15 nt, synthetic construct
  source 1..15: mol_type = other RNA
agttatggtgtgaag

SEQ ID NO: 351 - RNA, 15 nt, synthetic construct
  source 1..15: mol_type = other RNA
tagttcacaagagaa

SEQ ID NO: 352 - RNA, 15 nt, synthetic construct
  source 1..15: mol_type = other RNA
aggaattcctgaatt

SEQ ID NO: 353 - RNA, 15 nt, synthetic construct
  source 1..15: mol_type = other RNA
tgggtcaaagtgtct

SEQ ID NO: 354 - RNA, 15 nt, synthetic construct
  source 1..15: mol_type = other RNA
aagctctgtttgtgt

SEQ ID NO: 355 - RNA, 15 nt, synthetic construct
  source 1..15: mol_type = other RNA
caaagctctgtttgt

SEQ ID NO: 356 - RNA, 15 nt, synthetic construct
  source 1..15: mol_type = other RNA
aggagaaactccaag

SEQ ID NO: 357 - RNA, 15 nt, synthetic construct
  source 1..15: mol_type = other RNA
aagttatggtgtgaa

SEQ ID NO: 358 - RNA, 15 nt, synthetic construct
  source 1..15: mol_type = other RNA
agtcgtttcattcaa

SEQ ID NO: 359 - RNA, 15 nt, synthetic construct
  source 1..15: mol_type = other RNA
atatggaaaacctgg

SEQ ID NO: 360 - RNA, 15 nt, synthetic construct
  source 1..15: mol_type = other RNA
tgtgagagagatgct

SEQ ID NO: 361 - RNA, 15 nt, synthetic construct
  source 1..15: mol_type = other RNA
gattatctggatgtc

SEQ ID NO: 362 - RNA, 15 nt, synthetic construct
  source 1..15: mol_type = other RNA
gagggaacaactcga

SEQ ID NO: 363 - RNA, 15 nt, synthetic construct
  source 1..15: mol_type = other RNA
tgagcaacatgtgtt

SEQ ID NO: 364 - RNA, 15 nt, synthetic construct
  source 1..15: mol_type = other RNA
caacttaattgagaa

SEQ ID NO: 365 - RNA, 15 nt, synthetic construct
  source 1..15: mol_type = other RNA
aatgctttggcttcc

SEQ ID NO: 366 - RNA, 15 nt, synthetic construct
  source 1..15: mol_type = other RNA
tctctttccactgct

SEQ ID NO: 367 - RNA, 15 nt, synthetic construct
  source 1..15: mol_type = other RNA
cctccaggcagtgta

SEQ ID NO: 368 - RNA, 15 nt, synthetic construct
  source 1..15: mol_type = other RNA
tgtgaccaggtctag

SEQ ID NO: 369 - RNA, 15 nt, synthetic construct
  source 1..15: mol_type = other RNA
tctgtttgtgtctga

SEQ ID NO: 370 - RNA, 15 nt, synthetic construct
  source 1..15: mol_type = other RNA
tgaaggagaaactcc

SEQ ID NO: 371 - RNA, 15 nt, synthetic construct
  source 1..15: mol_type = other RNA
tgacagcagcacatt

SEQ ID NO: 372 - RNA, 15 nt, synthetic construct
  source 1..15: mol_type = other RNA
atatcaaagctctgt

SEQ ID NO: 373 - RNA, 15 nt, synthetic construct
  source 1..15: mol_type = other RNA
ctgcacaggatatca

SEQ ID NO: 374 - RNA, 15 nt, synthetic construct
  source 1..15: mol_type = other RNA
tatgacgttgccctg

SEQ ID NO: 375 - RNA, 15 nt, synthetic construct
  source 1..15: mol_type = other RNA
ccaggtctaggtctg

SEQ ID NO: 376 - RNA, 15 nt, synthetic construct
  source 1..15: mol_type = other RNA
ggtgtctgagtactt

SEQ ID NO: 377 - RNA, 15 nt, synthetic construct
  source 1..15: mol_type = other RNA
cgggacggagccttc

SEQ ID NO: 378 - RNA, 15 nt, synthetic construct
  source 1..15: mol_type = other RNA
ctatgacgttgccct

SEQ ID NO: 379 - RNA, 15 nt, synthetic construct
  source 1..15: mol_type = other RNA
ttgaattaaaacagc

SEQ ID NO: 380 - RNA, 15 nt, synthetic construct
  source 1..15: mol_type = other RNA
gtgatgagatctctt

SEQ ID NO: 381 - RNA, 15 nt, synthetic construct
  source 1..15: mol_type = other RNA
caattatgaagacca

SEQ ID NO: 382 - RNA, 15 nt, synthetic construct
  source 1..15: mol_type = other RNA
gaagccaagatatgg

SEQ ID NO: 383 - RNA, 15 nt, synthetic construct
  source 1..15: mol_type = other RNA
cattcaagttggtgt

SEQ ID NO: 384 - RNA, 15 nt, synthetic construct
  source 1..15: mol_type = other RNA
gaattaaaacagctg

SEQ ID NO: 385 - RNA, 15 nt, synthetic construct
  source 1..15: mol_type = other RNA
aaggtggcaagttat

SEQ ID NO: 386 - RNA, 15 nt, synthetic construct
  source 1..15: mol_type = other RNA
caggtacctgctcac

SEQ ID NO: 387 - RNA, 15 nt, synthetic construct
  source 1..15: mol_type = other RNA
gaggtctacatcaag

SEQ ID NO: 388 - RNA, 15 nt, synthetic construct
  source 1..15: mol_type = other RNA
aactaccacttgcca

SEQ ID NO: 389 - RNA, 15 nt, synthetic construct
  source 1..15: mol_type = other RNA
gctttgaggcttcct

SEQ ID NO: 390 - RNA, 15 nt, synthetic construct
  source 1..15: mol_type = other RNA
caattactgtcattg

SEQ ID NO: 391 - RNA, 15 nt, synthetic construct
  source 1..15: mol_type = other RNA
aacatgtgttcaaag

SEQ ID NO: 392 - RNA, 15 nt, synthetic construct
  source 1..15: mol_type = other RNA
caagatgaggatttg

SEQ ID NO: 393 - RNA, 15 nt, synthetic construct
  source 1..15: mol_type = other RNA
gaaggagaaactcca

SEQ ID NO: 394 - RNA, 15 nt, synthetic construct
  source 1..15: mol_type = other RNA
ggtggcaagttatgg

SEQ ID NO: 395 - RNA, 15 nt, synthetic construct
  source 1..15: mol_type = other RNA
tgaattaaaacagct

SEQ ID NO: 396 - RNA, 15 nt, synthetic construct
  source 1..15: mol_type = other RNA
aacaactcgagcttt

SEQ ID NO: 397 - RNA, 15 nt, synthetic construct
  source 1..15: mol_type = other RNA
actatgacgttgccc

SEQ ID NO: 398 - RNA, 15 nt, synthetic construct
  source 1..15: mol_type = other RNA
tggaaaacctggaag

SEQ ID NO: 399 - RNA, 15 nt, synthetic construct
  source 1..15: mol_type = other RNA
atggaaaacctggaa

SEQ ID NO: 400 - RNA, 15 nt, synthetic construct
  source 1..15: mol_type = other RNA
attgcacaacatggg

SEQ ID NO: 401 - RNA, 15 nt, synthetic construct
  source 1..15: mol_type = other RNA
aagtcaaggatatgg

SEQ ID NO: 402 - RNA, 15 nt, synthetic construct
  source 1..15: mol_type = other RNA
tgtgttcaaagtcaa

SEQ ID NO: 403 - RNA, 15 nt, synthetic construct
  source 1..15: mol_type = other RNA
aactccaagatgagg

SEQ ID NO: 404 - RNA, 15 nt, synthetic construct
  source 1..15: mol_type = other RNA
caatgagcaacatgt

SEQ ID NO: 405 - RNA, 15 nt, synthetic construct
  source 1..15: mol_type = other RNA
tcattcaagttggtg

SEQ ID NO: 406 - RNA, 15 nt, synthetic construct
  source 1..15: mol_type = other RNA
agacagcgatctgtg

SEQ ID NO: 407 - RNA, 15 nt, synthetic construct
  source 1..15: mol_type = other RNA
aaaggcagctgtgag

SEQ ID NO: 408 - RNA, 15 nt, synthetic construct
  source 1..15: mol_type = other RNA
tgattctggcggccc

SEQ ID NO: 409 - RNA, 15 nt, synthetic construct
  source 1..15: mol_type = other RNA
gagtttcagcttgga

SEQ ID NO: 410 - RNA, 15 nt, synthetic construct
  source 1..15: mol_type = other RNA
gttgccctgatcaag

SEQ ID NO: 411 - RNA, 15 nt, synthetic construct
  source 1..15: mol_type = other RNA
catggtttgggaaca

SEQ ID NO: 412 - RNA, 15 nt, synthetic construct
  source 1..15: mol_type = other RNA
cggcaaaagcaggta

SEQ ID NO: 413 - RNA, 15 nt, synthetic construct
  source 1..15: mol_type = other RNA
aagacaatgagcaac

SEQ ID NO: 414 - RNA, 15 nt, synthetic construct
  source 1..15: mol_type = other RNA
cagcggcgaacgtgt

SEQ ID NO: 415 - RNA, 15 nt, synthetic construct
  source 1..15: mol_type = other RNA
ctacatcaagaatgg

SEQ ID NO: 416 - RNA, 15 nt, synthetic construct
  source 1..15: mol_type = other RNA
ctgatcaagctcaag

SEQ ID NO: 417 - RNA, 15 nt, synthetic construct
  source 1..15: mol_type = other RNA
tctacatcaagaatg

SEQ ID NO: 418 - RNA, 15 nt, synthetic construct
  source 1..15: mol_type = other RNA
ccaagactccttcat

SEQ ID NO: 419 - RNA, 15 nt, synthetic construct
  source 1..15: mol_type = other RNA
tggtgtgaagccaag

SEQ ID NO: 420 - RNA, 15 nt, synthetic construct
  source 1..15: mol_type = other RNA
tgtgaagccaagata

SEQ ID NO: 421 - RNA, 15 nt, synthetic construct
  source 1..15: mol_type = other RNA
aaggcagctgtgaga

SEQ ID NO: 422 - RNA, 15 nt, synthetic construct
  source 1..15: mol_type = other RNA
tcagacagcattggg

SEQ ID NO: 423 - RNA, 15 nt, synthetic construct
  source 1..15: mol_type = other RNA
tgtgaccaccactcc

SEQ ID NO: 424 - RNA, 15 nt, synthetic construct
  source 1..15: mol_type = other RNA
gagtgagtccctatg

SEQ ID NO: 425 - RNA, 15 nt, synthetic construct
  source 1..15: mol_type = other RNA
caagttgaagtcagg

SEQ ID NO: 426 - RNA, 15 nt, synthetic construct
  source 1..15: mol_type = other RNA
aacttaattgagaag

SEQ ID NO: 427 - RNA, 15 nt, synthetic construct
  source 1..15: mol_type = other RNA
ctgaaggagaaactc

SEQ ID NO: 428 - RNA, 15 nt, synthetic construct
  source 1..15: mol_type = other RNA
aggatatcaaagctc

SEQ ID NO: 429 - RNA, 15 nt, synthetic construct
  source 1..15: mol_type = other RNA
caaagtcaaggacat

SEQ ID NO: 430 - RNA, 15 nt, synthetic construct
  source 1..15: mol_type = other RNA
cagacacgtacctgc

SEQ ID NO: 431 - RNA, 15 nt, synthetic construct
  source 1..15: mol_type = other RNA
gcagcacattgtttc

SEQ ID NO: 432 - RNA, 15 nt, synthetic construct
  source 1..15: mol_type = other RNA
cctgcacaggatatc

SEQ ID NO: 433 - RNA, 15 nt, synthetic construct
  source 1..15: mol_type = other RNA
ccagtctctgagtct

SEQ ID NO: 434 - RNA, 15 nt, synthetic construct
  source 1..15: mol_type = other RNA
aattactgtcattga

SEQ ID NO: 435 - RNA, 15 nt, synthetic construct
  source 1..15: mol_type = other RNA
caggaaggtggctct

SEQ ID NO: 436 - RNA, 15 nt, synthetic construct
  source 1..15: mol_type = other RNA
tgttcaaagtcaagg

SEQ ID NO: 437 - RNA, 15 nt, synthetic construct
  source 1..15: mol_type = other RNA
agaagtcgtttcatt

SEQ ID NO: 438 - RNA, 15 nt, synthetic construct
  source 1..15: mol_type = other RNA
gctttcctgtcttcc

SEQ ID NO: 439 - RNA, 15 nt, synthetic construct
  source 1..15: mol_type = other RNA
caggatatcaaagct

SEQ ID NO: 440 - RNA, 15 nt, synthetic construct
  source 1..15: mol_type = other RNA
gatcaagctcaagaa

SEQ ID NO: 441 - RNA, 15 nt, synthetic construct
  source 1..15: mol_type = other RNA
gtgcagagcaatcca

SEQ ID NO: 442 - RNA, 15 nt, synthetic construct
  source 1..15: mol_type = other RNA
agatgctcaatatgc

SEQ ID NO: 443 - RNA, 15 nt, synthetic construct
  source 1..15: mol_type = other RNA
tcaaagtcaaggata

SEQ ID NO: 444 - RNA, 15 nt, synthetic construct
  source 1..15: mol_type = other RNA
tagtggatgtctgca

SEQ ID NO: 445 - RNA, 15 nt, synthetic construct
  source 1..15: mol_type = other RNA
tcggaaggaggtcta

SEQ ID NO: 446 - RNA, 15 nt, synthetic construct
  source 1..15: mol_type = other RNA
ttaattgagaaggtg

SEQ ID NO: 447 - RNA, 15 nt, synthetic construct
  source 1..15: mol_type = other RNA
tccttccgacttctc

SEQ ID NO: 448 - RNA, 15 nt, synthetic construct
  source 1..15: mol_type = other RNA
ccgtaccctgtgcag

SEQ ID NO: 449 - RNA, 15 nt, synthetic construct
  source 1..15: mol_type = other RNA
ccaattactgtcatt

SEQ ID NO: 450 - RNA, 15 nt, synthetic construct
  source 1..15: mol_type = other RNA
agtcagggactaaca

SEQ ID NO: 451 - RNA, 15 nt, synthetic construct
  source 1..15: mol_type = other RNA
aaagtcaaggatatg

SEQ ID NO: 452 - RNA, 15 nt, synthetic construct
  source 1..15: mol_type = other RNA
gtgcagacacgtacc

SEQ ID NO: 453 - RNA, 15 nt, synthetic construct
  source 1..15: mol_type = other RNA
tactttgtgctgaca

SEQ ID NO: 454 - RNA, 15 nt, synthetic construct
  source 1..15: mol_type = other RNA
aattatgaagaccac

SEQ ID NO: 455 - RNA, 15 nt, synthetic construct
  source 1..15: mol_type = other RNA
tctctgagtctctgt

SEQ ID NO: 456 - RNA, 15 nt, synthetic construct
  source 1..15: mol_type = other RNA
tatctggatgtctat

SEQ ID NO: 457 - RNA, 15 nt, synthetic construct
  source 1..15: mol_type = other RNA
tgactcggaaggagg

SEQ ID NO: 458 - RNA, 15 nt, synthetic construct
  source 1..15: mol_type = other RNA
cttcaggctccatga

SEQ ID NO: 459 - RNA, 15 nt, synthetic construct
  source 1..15: mol_type = other RNA
agtgacatatgccac

SEQ ID NO: 460 - RNA, 15 nt, synthetic construct
  source 1..15: mol_type = other RNA
gaacatcaatgcttt

SEQ ID NO: 461 - RNA, 15 nt, synthetic construct
  source 1..15: mol_type = other RNA
actggaggagtgagt

SEQ ID NO: 462 - RNA, 15 nt, synthetic construct
  source 1..15: mol_type = other RNA
aagtcaaggacatct

SEQ ID NO: 463 - RNA, 15 nt, synthetic construct
  source 1..15: mol_type = other RNA
attgaattaaaacag

SEQ ID NO: 464 - RNA, 15 nt, synthetic construct
  source 1..15: mol_type = other RNA
tccatgaacatctac

SEQ ID NO: 465 - RNA, 15 nt, synthetic construct
  source 1..15: mol_type = other RNA
ctttccactgctatg

SEQ ID NO: 466 - RNA, 15 nt, synthetic construct
  source 1..15: mol_type = other RNA
ctgccaagtgaatgg

SEQ ID NO: 467 - RNA, 15 nt, synthetic construct
  source 1..15: mol_type = other RNA
aagtgaacatcaatg

SEQ ID NO: 468 - RNA, 15 nt, synthetic construct
  source 1..15: mol_type = other RNA
tgctgccctggctga

SEQ ID NO: 469 - RNA, 15 nt, synthetic construct
  source 1..15: mol_type = other RNA
gcttggacactgagc

SEQ ID NO: 470 - RNA, 15 nt, synthetic construct
  source 1..15: mol_type = other RNA
aaagccagtctctga

SEQ ID NO: 471 - RNA, 15 nt, synthetic construct
  source 1..15: mol_type = other RNA
aggattatctggatg

SEQ ID NO: 472 - RNA, 15 nt, synthetic construct
  source 1..15: mol_type = other RNA
acttaattgagaagg

SEQ ID NO: 473 - RNA, 15 nt, synthetic construct
  source 1..15: mol_type = other RNA
aggtctaggtctgga

SEQ ID NO: 474 - RNA, 15 nt, synthetic construct
  source 1..15: mol_type = other RNA
tgactatgacgttgc

SEQ ID NO: 475 - RNA, 15 nt, synthetic construct
  source 1..15: mol_type = other RNA
gtcgtttcattcaag

SEQ ID NO: 476 - RNA, 15 nt, synthetic construct
  source 1..15: mol_type = other RNA
tgtgtctgaggagga

SEQ ID NO: 477 - RNA, 15 nt, synthetic construct
  source 1..15: mol_type = other RNA
caatgctttggcttc

SEQ ID NO: 478 - RNA, 15 nt, synthetic construct
  source 1..15: mol_type = other RNA
gagaagtcgtttcat

SEQ ID NO: 479 - RNA, 15 nt, synthetic construct
  source 1..15: mol_type = other RNA
gaagaccacaagttg

SEQ ID NO: 480 - RNA, 15 nt, synthetic construct
  source 1..15: mol_type = other RNA
gaacatctacctggt

SEQ ID NO: 481 - RNA, 15 nt, synthetic construct
  source 1..15: mol_type = other RNA
gtgccagaacacaga

SEQ ID NO: 482 - RNA, 15 nt, synthetic construct
  source 1..15: mol_type = other RNA
gaaggtggcaagtta

SEQ ID NO: 483 - RNA, 15 nt, synthetic construct
  source 1..15: mol_type = other RNA
caagcaaccatggca

SEQ ID NO: 484 - RNA, 15 nt, synthetic construct
  source 1..15: mol_type = other RNA
caggcccatttgtct

SEQ ID NO: 485 - RNA, 15 nt, synthetic construct
  source 1..15: mol_type = other RNA
tgtctagtcaactta

SEQ ID NO: 486 - RNA, 15 nt, synthetic construct
  source 1..15: mol_type = other RNA
ccgcacccgccatgt

SEQ ID NO: 487 - RNA, 15 nt, synthetic construct
  source 1..15: mol_type = other RNA
ttgatgagatccggg

SEQ ID NO: 488 - RNA, 15 nt, synthetic construct
  source 1..15: mol_type = other RNA
tttgaggcttcctcc

SEQ ID NO: 489 - RNA, 15 nt, synthetic construct
  source 1..15: mol_type = other RNA
catgtgttcaaagtc

SEQ ID NO: 490 - RNA, 15 nt, synthetic construct
  source 1..15: mol_type = other RNA
tgtctgaggaggaga

SEQ ID NO: 491 - RNA, 15 nt, synthetic construct
  source 1..15: mol_type = other RNA
gacggagccttcctg

SEQ ID NO: 492 - RNA, 15 nt, synthetic construct
  source 1..15: mol_type = other RNA
aggtgattctggcgg

SEQ ID NO: 493 - RNA, 15 nt, synthetic construct
  source 1..15: mol_type = other RNA
tgagatctctttcca

SEQ ID NO: 494 - RNA, 15 nt, synthetic construct
  source 1..15: mol_type = other RNA
gagatccgggacttg

SEQ ID NO: 495 - RNA, 15 nt, synthetic construct
  source 1..15: mol_type = other RNA
ccctgatcaagctca

SEQ ID NO: 496 - RNA, 15 nt, synthetic construct
  source 1..15: mol_type = other RNA
agacaatgagcaaca

SEQ ID NO: 497 - RNA, 15 nt, synthetic construct
  source 1..15: mol_type = other RNA
gattaccacaagcaa

SEQ ID NO: 498 - RNA, 15 nt, synthetic construct
  source 1..15: mol_type = other RNA
aatgtgagtgatgag

SEQ ID NO: 499 - RNA, 15 nt, synthetic construct
  source 1..15: mol_type = other RNA
cagcttggacactga

SEQ ID NO: 500 - RNA, 15 nt, synthetic construct
  source 1..15: mol_type = other RNA
tacatcaagaatggg

SEQ ID NO: 501 - RNA, 15 nt, synthetic construct
  source 1..15: mol_type = other RNA
agcagcacattgttt

SEQ ID NO: 502 - RNA, 15 nt, synthetic construct
  source 1..15: mol_type = other RNA
cacaagttgaagtca

SEQ ID NO: 503 - RNA, 14 nt, synthetic construct
  source 1..14: mol_type = other RNA
agtctctgtggcaa

SEQ ID NO: 504 - RNA, 11 nt, synthetic construct
  source 1..11: mol_type = other RNA
gtttcattcaa

SEQ ID NO: 505 - RNA, 19 nt, synthetic construct
  source 1..19: mol_type = other RNA
ncacagtttggcctggaga

SEQ ID NO: 506 - RNA, 19 nt, synthetic construct
  source 1..19: mol_type = other RNA
ngaatcttgaagtcaggaa

SEQ ID NO: 507 - RNA, 19 nt, synthetic construct
  source 1..19: mol_type = other RNA
ntgggcttgtagctggcac

SEQ ID NO: 508 - RNA, 19 nt, synthetic construct
  source 1..19: mol_type = other RNA
ncaagtaattatagtgagt

SEQ ID NO: 509 - RNA, 19 nt, synthetic construct
  source 1..19: mol_type = other RNA
naacaggtttgtctgtatg

SEQ ID NO: 510 - RNA, 19 nt, synthetic construct
  source 1..19: mol_type = other RNA
ncagacattttaacacaga

SEQ ID NO: 511 - RNA, 19 nt, synthetic construct
  source 1..19: mol_type = other RNA
ncctggagctggttgccac

SEQ ID NO: 512 - RNA, 19 nt, synthetic construct
  source 1..19: mol_type = other RNA
nataaaatcaagtaattat

SEQ ID NO: 513 - RNA, 19 nt, synthetic construct
  source 1..19: mol_type = other RNA
nacacagtttggcctggag

SEQ ID NO: 514 - RNA, 19 nt, synthetic construct
  source 1..19: mol_type = other RNA
nggaatcttgaagtcagga

SEQ ID NO: 515 - RNA, 19 nt, synthetic construct
  source 1..19: mol_type = other RNA
ngacattttaacacagaac

SEQ ID NO: 516 - RNA, 19 nt, synthetic construct
  source 1..19: mol_type = other RNA
ngaagtcaggaaaagagat

SEQ ID NO: 517 - RNA, 19 nt, synthetic construct
  source 1..19: mol_type = other RNA
nacagtttggcctggagaa

SEQ ID NO: 518 - RNA, 19 nt, synthetic construct
  source 1..19: mol_type = other RNA
nattatagtgagttatttt

SEQ ID NO: 519 - RNA, 19 nt, synthetic construct
  source 1..19: mol_type = other RNA
nccaagtcagatgtctctt

SEQ ID NO: 520 - RNA, 19 nt, synthetic construct
  source 1..19: mol_type = other RNA
ncaggaaaagagataattc

SEQ ID NO: 521 - RNA, 19 nt, synthetic construct
  source 1..19: mol_type = other RNA
ngcaagacatattctttaa

SEQ ID NO: 522 - RNA, 19 nt, synthetic construct
  source 1..19: mol_type = other RNA
naaggccaatttccagagg

SEQ ID NO: 523 - RNA, 19 nt, synthetic construct
  source 1..19: mol_type = other RNA
naagtaattatagtgagtt

SEQ ID NO: 524 - RNA, 19 nt, synthetic construct
  source 1..19: mol_type = other RNA
ntaaaatcaagtaattata

SEQ ID NO: 525 - RNA, 19 nt, synthetic construct
  source 1..19: mol_type = other RNA
ntcaagtaattatagtgag

SEQ ID NO: 526 - RNA, 19 nt, synthetic construct
  source 1..19: mol_type = other RNA
nccaatttccagaggaagc

SEQ ID NO: 527 - RNA, 19 nt, synthetic construct
  source 1..19: mol_type = other RNA
ngtaattatagtgagttat

SEQ ID NO: 528 - RNA, 19 nt, synthetic construct
  source 1..19: mol_type = other RNA
naaaggtacttgttgttta

SEQ ID NO: 529 - RNA, 19 nt, synthetic construct
  source 1..19: mol_type = other RNA
nactgctgtttcagaatca

SEQ ID NO: 530 - RNA, 19 nt, synthetic construct
  source 1..19: mol_type = other RNA
nctgctgtttcagaatcaa

SEQ ID NO: 531 - RNA, 19 nt, synthetic construct
  source 1..19: mol_type = other RNA
ntataaaggtacttgttgt

SEQ ID NO: 532 - RNA, 19 nt, synthetic construct
  source 1..19: mol_type = other RNA
ngtaaacagttcctttcaa

SEQ ID NO: 533 - RNA, 19 nt, synthetic construct
  source 1..19: mol_type = other RNA
ngtaactttggctgagaga

SEQ ID NO: 534 - RNA, 19 nt, synthetic construct
  source 1..19: mol_type = other RNA
natagttgtaaacagttcc

SEQ ID NO: 535 - RNA, 19 nt, synthetic construct
  source 1..19: mol_type = other RNA
ncatattctttaacttcaa

SEQ ID NO: 536 - RNA, 19 nt, synthetic construct
  source 1..19: mol_type = other RNA
nagcagtccttttacactc

SEQ ID NO: 537 - RNA, 19 nt, synthetic construct
  source 1..19: mol_type = other RNA
nagtgagttattttgtcaa

SEQ ID NO: 538 - RNA, 19 nt, synthetic construct
  source 1..19: mol_type = other RNA
nggaagacatctttgaaca

SEQ ID NO: 539 - RNA, 19 nt, synthetic construct
  source 1..19: mol_type = other RNA
ncagtccttttacactcaa

SEQ ID NO: 540 - RNA, 19 nt, synthetic construct
  source 1..19: mol_type = other RNA
ngttattttgtcaatatat

SEQ ID NO: 541 - RNA, 19 nt, synthetic construct
  source 1..19: mol_type = other RNA
ntacaacagaatatggtat

SEQ ID NO: 542 - RNA, 19 nt, synthetic construct
  source 1..19: mol_type = other RNA
nttattttgtcaatatatg

SEQ ID NO: 543 - RNA, 19 nt, synthetic construct
  source 1..19: mol_type = other RNA
naggcttcaggaaaagagg

SEQ ID NO: 544 - RNA, 19 nt, synthetic construct
  source 1..19: mol_type = other RNA
nggaaaagagataattcca

SEQ ID NO: 545 - RNA, 19 nt, synthetic construct
  source 1..19: mol_type = other RNA
ngttacagcaatataaagg

SEQ ID NO: 546 - RNA, 19 nt, synthetic construct
  source 1..19: mol_type = other RNA
nataagcatatgcaatctc

SEQ ID NO: 547 - RNA, 19 nt, synthetic construct
  source 1..19: mol_type = other RNA
natattctttaacttcaaa

SEQ ID NO: 548 - RNA, 19 nt, synthetic construct
  source 1..19: mol_type = other RNA
nagacatctttgaacacct

SEQ ID NO: 549 - RNA, 19 nt, synthetic construct
  source 1..19: mol_type = other RNA
ncaggaagacatctttgaa

SEQ ID NO: 550 - RNA, 19 nt, synthetic construct
  source 1..19: mol_type = other RNA
nacagcaatataaaggtac

SEQ ID NO: 551 - RNA, 19 nt, synthetic construct
  source 1..19: mol_type = other RNA
nattgtcataggttattgg

SEQ ID NO: 552 - RNA, 19 nt, synthetic construct
  source 1..19: mol_type = other RNA
ngagttattttgtcaatat

SEQ ID NO: 553 - RNA, 19 nt, synthetic construct
  source 1..19: mol_type = other RNA
ngtgagttattttgtcaat

SEQ ID NO: 554 - RNA, 19 nt, synthetic construct
  source 1..19: mol_type = other RNA
ntgagttattttgtcaata

SEQ ID NO: 555 - RNA, 19 nt, synthetic construct
  source 1..19: mol_type = other RNA
naattttccttgaaagatc

SEQ ID NO: 556 - RNA, 19 nt, synthetic construct
  source 1..19: mol_type = other RNA
nctgttacagcaatataaa

SEQ ID NO: 557 - RNA, 19 nt, synthetic construct
  source 1..19: mol_type = other RNA
naatccattgtcataggtt

SEQ ID NO: 558 - RNA, 19 nt, synthetic construct
  source 1..19: mol_type = other RNA
natccattgtcataggtta

SEQ ID NO: 559 - RNA, 19 nt, synthetic construct
  source 1..19: mol_type = other RNA
nagaaatccattgtcatag

SEQ ID NO: 560 - RNA, 19 nt, synthetic construct
  source 1..19: mol_type = other RNA
nagacatattctttaactt

SEQ ID NO: 561 - RNA, 19 nt, synthetic construct
  source 1..19: mol_type = other RNA
nagtgcagattccctccac

SEQ ID NO: 562 - RNA, 19 nt, synthetic construct
  source 1..19: mol_type = other RNA
ntccattgtcataggttat

SEQ ID NO: 563 - RNA, 19 nt, synthetic construct
  source 1..19: mol_type = other RNA
ngacatctttgaacacctt

SEQ ID NO: 564 - RNA, 19 nt, synthetic construct
  source 1..19: mol_type = other RNA
ncattgtcataggttattg

SEQ ID NO: 565 - RNA, 19 nt, synthetic construct
  source 1..19: mol_type = other RNA
ngaagagaaatccattgtc

SEQ ID NO: 566 - RNA, 19 nt, synthetic construct
  source 1..19: mol_type = other RNA
nacatattctttaacttca

SEQ ID NO: 567 - RNA, 19 nt, synthetic construct
  source 1..19: mol_type = other RNA
nagtccttttacactcaaa

SEQ ID NO: 568 - RNA, 19 nt, synthetic construct
  source 1..19: mol_type = other RNA
nattttccttgaaagatcc

SEQ ID NO: 569 - RNA, 19 nt, synthetic construct
  source 1..19: mol_type = other RNA
ngaaattgtattttatctg

SEQ ID NO: 570 - RNA, 19 nt, synthetic construct
  source 1..19: mol_type = other RNA
ngtaatttcaaaattctta

SEQ ID NO: 571 - RNA, 19 nt, synthetic construct
  source 1..19: mol_type = other RNA
naaaattcttaaagttctt

SEQ ID NO: 572 - RNA, 19 nt, synthetic construct
  source 1..19: mol_type = other RNA
ngaattttggttctgctct

SEQ ID NO: 573 - RNA, 19 nt, synthetic construct
  source 1..19: mol_type = other RNA
ngtcattttataattatgt

SEQ ID NO: 574 - RNA, 19 nt, synthetic construct
  source 1..19: mol_type = other RNA
ncaaatcctgtactgacaa

SEQ ID NO: 575 - RNA, 19 nt, synthetic construct
  source 1..19: mol_type = other RNA
ngataacttttaatagaga

SEQ ID NO: 576 - RNA, 19 nt, synthetic construct
  source 1..19: mol_type = other RNA
nttaagtcttctcttattc

SEQ ID NO: 577 - RNA, 19 nt, synthetic construct
  source 1..19: mol_type = other RNA
nataattccaatatgatca

SEQ ID NO: 578 - RNA, 19 nt, synthetic construct
  source 1..19: mol_type = other RNA
ngataaatgaacatggcct

SEQ ID NO: 579 - RNA, 19 nt, synthetic construct
  source 1..19: mol_type = other RNA
naaggttcatcattttctt

SEQ ID NO: 580 - RNA, 19 nt, synthetic construct
  source 1..19: mol_type = other RNA
nggaagtgctataaaacat

SEQ ID NO: 581 - RNA, 19 nt, synthetic construct
  source 1..19: mol_type = other RNA
ncaagtactcttaaagcaa

SEQ ID NO: 582 - RNA, 19 nt, synthetic construct
  source 1..19: mol_type = other RNA
nccaatgatttcctgtttc

SEQ ID NO: 583 - RNA, 19 nt, synthetic construct
  source 1..19: mol_type = other RNA
natggtatattcatttcca

SEQ ID NO: 584 - RNA, 19 nt, synthetic construct
  source 1..19: mol_type = other RNA
naacaagatgaacttccca

SEQ ID NO: 585 - RNA, 19 nt, synthetic construct
  source 1..19: mol_type = other RNA
ngaacttcaggaattttag

SEQ ID NO: 586 - RNA, 19 nt, synthetic construct
  source 1..19: mol_type = other RNA
nagtcttctcttattccaa

SEQ ID NO: 587 - RNA, 19 nt, synthetic construct
  source 1..19: mol_type = other RNA
naatgtttatactttgata

SEQ ID NO: 588 - RNA, 19 nt, synthetic construct
  source 1..19: mol_type = other RNA
ncggaatcgtacacaaagg

SEQ ID NO: 589 - RNA, 19 nt, synthetic construct
  source 1..19: mol_type = other RNA
natacctctgctcttctga

SEQ ID NO: 590 - RNA, 19 nt, synthetic construct
  source 1..19: mol_type = other RNA
natcaatttcttctaccat

SEQ ID NO: 591 - RNA, 19 nt, synthetic construct
  source 1..19: mol_type = other RNA
naacattgtgttttgcatt

SEQ ID NO: 592 - RNA, 19 nt, synthetic construct
  source 1..19: mol_type = other RNA
naactttataagcatatgc

SEQ ID NO: 593 - RNA, 19 nt, synthetic construct
  source 1..19: mol_type = other RNA
naggataacttttaataga

SEQ ID NO: 594 - RNA, 19 nt, synthetic construct
  source 1..19: mol_type = other RNA
ntttattggttgatactgt

SEQ ID NO: 595 - RNA, 19 nt, synthetic construct
  source 1..19: mol_type = other RNA
ngcaactgttttcttctgg

SEQ ID NO: 596 - RNA, 19 nt, synthetic construct
  source 1..19: mol_type = other RNA
ngctttgatacaacttcca

SEQ ID NO: 597 - RNA, 19 nt, synthetic construct
  source 1..19: mol_type = other RNA
ncaaagcttctctcttcaa

SEQ ID NO: 598 - RNA, 19 nt, synthetic construct
  source 1..19: mol_type = other RNA
nggaactcctttcgtctgc

SEQ ID NO: 599 - RNA, 19 nt, synthetic construct
  source 1..19: mol_type = other RNA
natgacagttctttgactg

SEQ ID NO: 600 - RNA, 19 nt, synthetic construct
  source 1..19: mol_type = other RNA
ntgcagaataacatgtcca

SEQ ID NO: 601 - RNA, 19 nt, synthetic construct
  source 1..19: mol_type = other RNA
nagaagtcctatagttgta

SEQ ID NO: 602 - RNA, 19 nt, synthetic construct
  source 1..19: mol_type = other RNA
nataacttttaatagagat

SEQ ID NO: 603 - RNA, 19 nt, synthetic construct
  source 1..19: mol_type = other RNA
nctaagatttcttttccaa

SEQ ID NO: 604 - RNA, 19 nt, synthetic construct
  source 1..19: mol_type = other RNA
nataaatgaacatggcctg

SEQ ID NO: 605 - RNA, 19 nt, synthetic construct
  source 1..19: mol_type = other RNA
natgaacatgttgtgtctc

SEQ ID NO: 606 - RNA, 19 nt, synthetic construct
  source 1..19: mol_type = other RNA
ngatcatcttttaagtctt

SEQ ID NO: 607 - RNA, 19 nt, synthetic construct
  source 1..19: mol_type = other RNA
nagcaattccatttatcaa

SEQ ID NO: 608 - RNA, 19 nt, synthetic construct
  source 1..19: mol_type = other RNA
ngtgaattttccttgaaag

SEQ ID NO: 609 - RNA, 19 nt, synthetic construct
  source 1..19: mol_type = other RNA
ncaaaattcttaaagttct

SEQ ID NO: 610 - RNA, 19 nt, synthetic construct
  source 1..19: mol_type = other RNA
naaactccagcaccgtcac

SEQ ID NO: 611 - RNA, 19 nt, synthetic construct
  source 1..19: mol_type = other RNA
ntgatattggaagtgctat

SEQ ID NO: 612 - RNA, 19 nt, synthetic construct
  source 1..19: mol_type = other RNA
ntgcattcagtgttactgg

SEQ ID NO: 613 - RNA, 19 nt, synthetic construct
  source 1..19: mol_type = other RNA
natgtttatactttgataa

SEQ ID NO: 614 - RNA, 19 nt, synthetic construct
  source 1..19: mol_type = other RNA
naattgtattttatctgga

SEQ ID NO: 615 - RNA, 19 nt, synthetic construct
  source 1..19: mol_type = other RNA
naagtcttctcttattcca

SEQ ID NO: 616 - RNA, 19 nt, synthetic construct
  source 1..19: mol_type = other RNA
ngaagtcctatagttgtaa

SEQ ID NO: 617 - RNA, 19 nt, synthetic construct
  source 1..19: mol_type = other RNA
nttgcttttatagtaattt

SEQ ID NO: 618 - RNA, 19 nt, synthetic construct
  source 1..19: mol_type = other RNA
ncaacattgtgttttgcat

SEQ ID NO: 619 - RNA, 19 nt, synthetic construct
  source 1..19: mol_type = other RNA
nggcagttgtttctaccat

SEQ ID NO: 620 - RNA, 19 nt, synthetic construct
  source 1..19: mol_type = other RNA
natgatcaatttcttctac

SEQ ID NO: 621 - RNA, 19 nt, synthetic construct
  source 1..19: mol_type = other RNA
ntaatttcaaaattcttaa

SEQ ID NO: 622 - RNA, 19 nt, synthetic construct
  source 1..19: mol_type = other RNA
ntcaacattgtgttttgca

SEQ ID NO: 623 - RNA, 19 nt, synthetic construct
  source 1..19: mol_type = other RNA
naaagtattcccaaaaggc

SEQ ID NO: 624 - RNA, 19 nt, synthetic construct
  source 1..19: mol_type = other RNA
naaacatggtacactgttt

SEQ ID NO: 625 - RNA, 19 nt, synthetic construct
  source 1..19: mol_type = other RNA
ncacagaactgcatcccag

SEQ ID NO: 626 - RNA, 19 nt, synthetic construct
  source 1..19: mol_type = other RNA
nccaagtactcttaaagca

SEQ ID NO: 627 - RNA, 19 nt, synthetic construct
  source 1..19: mol_type = other RNA
ngtagtatgacagttcttt

SEQ ID NO: 628 - RNA, 19 nt, synthetic construct
  source 1..19: mol_type = other RNA
nagaatagctttccctttt

SEQ ID NO: 629 - RNA, 19 nt, synthetic construct
  source 1..19: mol_type = other RNA
ncttttatagtaatttcaa

SEQ ID NO: 630 - RNA, 19 nt, synthetic construct
  source 1..19: mol_type = other RNA
naagctactccatcatcaa

SEQ ID NO: 631 - RNA, 19 nt, synthetic construct
  source 1..19: mol_type = other RNA
ngccactaattctaagtaa

SEQ ID NO: 632 - RNA, 19 nt, synthetic construct
  source 1..19: mol_type = other RNA
ntagactctatgactgtta

SEQ ID NO: 633 - RNA, 19 nt, synthetic construct
  source 1..19: mol_type = other RNA
ntaagatttcttttccaaa

SEQ ID NO: 634 - RNA, 19 nt, synthetic construct
  source 1..19: mol_type = other RNA
naatatttaaccagactga

SEQ ID NO: 635 - RNA, 19 nt, synthetic construct
  source 1..19: mol_type = other RNA
nagtaatttcaaaattctt

SEQ ID NO: 636 - RNA, 19 nt, synthetic construct
  source 1..19: mol_type = other RNA
ngaaaagagataattccaa

SEQ ID NO: 637 - RNA, 19 nt, synthetic construct
  source 1..19: mol_type = other RNA
naaatgcttgacacgatga

SEQ ID NO: 638 - RNA, 19 nt, synthetic construct
  source 1..19: mol_type = other RNA
natattcatttccaggaag

SEQ ID NO: 639 - RNA, 19 nt, synthetic construct
  source 1..19: mol_type = other RNA
naataaaagcaagtgccac

SEQ ID NO: 640 - RNA, 19 nt, synthetic construct
  source 1..19: mol_type = other RNA
nactatgcgtttgtaatca

SEQ ID NO: 641 - RNA, 19 nt, synthetic construct
  source 1..19: mol_type = other RNA
naattgaaatactctttcc

SEQ ID NO: 642 - RNA, 19 nt, synthetic construct
  source 1..19: mol_type = other RNA
ncaggataacttttaatag

SEQ ID NO: 643 - RNA, 19 nt, synthetic construct
  source 1..19: mol_type = other RNA
nacaacttccaaatacaca

SEQ ID NO: 644 - RNA, 19 nt, synthetic construct
  source 1..19: mol_type = other RNA
natcattctctaataaaag

SEQ ID NO: 645 - RNA, 19 nt, synthetic construct
  source 1..19: mol_type = other RNA
naatagctttcccttttga

SEQ ID NO: 646 - RNA, 19 nt, synthetic construct
  source 1..19: mol_type = other RNA
ngaaattcttgtctgtcat

SEQ ID NO: 647 - RNA, 19 nt, synthetic construct
  source 1..19: mol_type = other RNA
ntgaattttggttctgctc

SEQ ID NO: 648 - RNA, 19 nt, synthetic construct
  source 1..19: mol_type = other RNA
ngtgagctttacaaataag

SEQ ID NO: 649 - RNA, 19 nt, synthetic construct
  source 1..19: mol_type = other RNA
naacatggtacactgttta

SEQ ID NO: 650 - RNA, 19 nt, synthetic construct
  source 1..19: mol_type = other RNA
nagactctatgactgttac

SEQ ID NO: 651 - RNA, 19 nt, synthetic construct
  source 1..19: mol_type = other RNA
ntttcttgggagtcatctg

SEQ ID NO: 652 - RNA, 19 nt, synthetic construct
  source 1..19: mol_type = other RNA
ntaggcaaggagatgtcca

SEQ ID NO: 653 - RNA, 19 nt, synthetic construct
  source 1..19: mol_type = other RNA
naagccacctccatacctc

SEQ ID NO: 654 - RNA, 19 nt, synthetic construct
  source 1..19: mol_type = other RNA
naagatttcttttccaaac

SEQ ID NO: 655 - RNA, 19 nt, synthetic construct
  source 1..19: mol_type = other RNA
naagctgcaaacttcctca

SEQ ID NO: 656 - RNA, 19 nt, synthetic construct
  source 1..19: mol_type = other RNA
nctaataaaagcaagtgcc

SEQ ID NO: 657 - RNA, 19 nt, synthetic construct
  source 1..19: mol_type = other RNA
naattgtttgtgcattcag

SEQ ID NO: 658 - RNA, 19 nt, synthetic construct
  source 1..19: mol_type = other RNA
nccaaagcttctctcttca

SEQ ID NO: 659 - RNA, 19 nt, synthetic construct
  source 1..19: mol_type = other RNA
ncaactgttttcttctggg

SEQ ID NO: 660 - RNA, 19 nt, synthetic construct
  source 1..19: mol_type = other RNA
ntgctttgatacaacttcc

SEQ ID NO: 661 - RNA, 19 nt, synthetic construct
  source 1..19: mol_type = other RNA
nattcatctaaattagcta

SEQ ID NO: 662 - RNA, 19 nt, synthetic construct
  source 1..19: mol_type = other RNA
ngtgacgatgtaatagacc

SEQ ID NO: 663 - RNA, 19 nt, synthetic construct
  source 1..19: mol_type = other RNA
ngtacactgtttatctggt

SEQ ID NO: 664 - RNA, 19 nt, synthetic construct
  source 1..19: mol_type = other RNA
ngttgccttgtacttgaca

SEQ ID NO: 665 - RNA, 19 nt, synthetic construct
  source 1..19: mol_type = other RNA
ncaaggaaattcttgtctg

SEQ ID NO: 666 - RNA, 19 nt, synthetic construct
  source 1..19: mol_type = other RNA
ntaaccagactgaatcaga

SEQ ID NO: 667 - RNA, 19 nt, synthetic construct
  source 1..19: mol_type = other RNA
nagcagctatttcttctat

SEQ ID NO: 668 - RNA, 19 nt, synthetic construct
  source 1..19: mol_type = other RNA
ncagttttgtagatatcca

SEQ ID NO: 669 - RNA, 19 nt, synthetic construct
  source 1..19: mol_type = other RNA
natgatttcctgtttccag

SEQ ID NO: 670 - RNA, 19 nt, synthetic construct
  source 1..19: mol_type = other RNA
ngacaagatctcacctaca

SEQ ID NO: 671 - RNA, 19 nt, synthetic construct
  source 1..19: mol_type = other RNA
ntggattacctttaaccaa

SEQ ID NO: 672 - RNA, 19 nt, synthetic construct
  source 1..19: mol_type = other RNA
ngatactgtgaattttcct

SEQ ID NO: 673 - RNA, 19 nt, synthetic construct
  source 1..19: mol_type = other RNA
natactgggacaacgctca

SEQ ID NO: 674 - RNA, 19 nt, synthetic construct
  source 1..19: mol_type = other RNA
nataattaagtactgtctt

SEQ ID NO: 675 - RNA, 19 nt, synthetic construct
  source 1..19: mol_type = other RNA
naaacttcctcagaggtac

SEQ ID NO: 676 - RNA, 19 nt, synthetic construct
  source 1..19: mol_type = other RNA
naggccatgttatttcaga

SEQ ID NO: 677 - RNA, 19 nt, synthetic construct
  source 1..19: mol_type = other RNA
ngcaaactgtatgcagctg

SEQ ID NO: 678 - RNA, 19 nt, synthetic construct
  source 1..19: mol_type = other RNA
ngaatagctttcccttttg

SEQ ID NO: 679 - RNA, 19 nt, synthetic construct
  source 1..19: mol_type = other RNA
nactgtgaattttccttga

SEQ ID NO: 680 - RNA, 19 nt, synthetic construct
  source 1..19: mol_type = other RNA
ncaacttcaaagagttcaa

SEQ ID NO: 681 - RNA, 19 nt, synthetic construct
  source 1..19: mol_type = other RNA
ntgaattttgatattggaa

SEQ ID NO: 682 - RNA, 19 nt, synthetic construct
  source 1..19: mol_type = other RNA
naaggctgtaagatataag

SEQ ID NO: 683 - RNA, 19 nt, synthetic construct
  source 1..19: mol_type = other RNA
ntgcttttatagtaatttc

SEQ ID NO: 684 - RNA, 19 nt, synthetic construct
  source 1..19: mol_type = other RNA
ntccaagtactcttaaagc

SEQ ID NO: 685 - RNA, 19 nt, synthetic construct
  source 1..19: mol_type = other RNA
ncactaattctgctgtctg

SEQ ID NO: 686 - RNA, 19 nt, synthetic construct
  source 1..19: mol_type = other RNA
ntggcttgcttactggtaa

SEQ ID NO: 687 - RNA, 19 nt, synthetic construct
  source 1..19: mol_type = other RNA
nttgccttgtacttgacaa

SEQ ID NO: 688 - RNA, 19 nt, synthetic construct
  source 1..19: mol_type = other RNA
nagcatttctgtaggacat

SEQ ID NO: 689 - RNA, 19 nt, synthetic construct
  source 1..19: mol_type = other RNA
ntatactttgataagatgc

SEQ ID NO: 690 - RNA, 19 nt, synthetic construct
  source 1..19: mol_type = other RNA
ntaagtactgtcttccttt

SEQ ID NO: 691 - RNA, 19 nt, synthetic construct
  source 1..19: mol_type = other RNA
ntgcaaacttcctcagagg

SEQ ID NO: 692 - RNA, 19 nt, synthetic construct
  source 1..19: mol_type = other RNA
nagacagtttctcttttgg

SEQ ID NO: 693 - RNA, 19 nt, synthetic construct
  source 1..19: mol_type = other RNA
nttcagtttgtagggagag

SEQ ID NO: 694 - RNA, 19 nt, synthetic construct
  source 1..19: mol_type = other RNA
nggaatgtttatactttga

SEQ ID NO: 695 - RNA, 19 nt, synthetic construct
  source 1..19: mol_type = other RNA
naacagggtcttcatgtgt

SEQ ID NO: 696 - RNA, 19 nt, synthetic construct
  source 1..19: mol_type = other RNA
ngagattgttgcatcaaat

SEQ ID NO: 697 - RNA, 19 nt, synthetic construct
  source 1..19: mol_type = other RNA
nagtcatctgcatttgcat

SEQ ID NO: 698 - RNA, 19 nt, synthetic construct
  source 1..19: mol_type = other RNA
naatgtttatatttagcag

SEQ ID NO: 699 - RNA, 19 nt, synthetic construct
  source 1..19: mol_type = other RNA
ngaacaagatgaacttccc

SEQ ID NO: 700 - RNA, 19 nt, synthetic construct
  source 1..19: mol_type = other RNA
ngtatttctgcctcttcag

SEQ ID NO: 701 - RNA, 19 nt, synthetic construct
  source 1..19: mol_type = other RNA
nagaactgcatcccagaag

SEQ ID NO: 702 - RNA, 19 nt, synthetic construct
  source 1..19: mol_type = other RNA
ntccggtgtccaataacct

SEQ ID NO: 703 - RNA, 19 nt, synthetic construct
  source 1..19: mol_type = other RNA
natcaattgtttgtgcatt

SEQ ID NO: 704 - RNA, 19 nt, synthetic construct
  source 1..19: mol_type = other RNA
natactctttccaagggct

SEQ ID NO: 705 - RNA, 19 nt, synthetic construct
  source 1..19: mol_type = other RNA
ncaaatgcttcagtgtatc

SEQ ID NO: 706 - RNA, 19 nt, synthetic construct
  source 1..19: mol_type = other RNA
nagcaagtgccactaattc

SEQ ID NO: 707 - RNA, 19 nt, synthetic construct
  source 1..19: mol_type = other RNA
ntaatagagattgttgcat

SEQ ID NO: 708 - RNA, 19 nt, synthetic construct
  source 1..19: mol_type = other RNA
ntagagattgttgcatcaa

SEQ ID NO: 709 - RNA, 19 nt, synthetic construct
  source 1..19: mol_type = other RNA
naactcctttcgtctgcta

SEQ ID NO: 710 - RNA, 19 nt, synthetic construct
  source 1..19: mol_type = other RNA
ntcattttataattatgta

SEQ ID NO: 711 - RNA, 19 nt, synthetic construct
  source 1..19: mol_type = other RNA
nagaattgaaatactcttt

SEQ ID NO: 712 - RNA, 19 nt, synthetic construct
  source 1..19: mol_type = other RNA
naagcctttctaattccaa

SEQ ID NO: 713 - RNA, 19 nt, synthetic construct
  source 1..19: mol_type = other RNA
ncaatatttaaccagactg

SEQ ID NO: 714 - RNA, 19 nt, synthetic construct
  source 1..19: mol_type = other RNA
nggtatattcatttccagg

SEQ ID NO: 715 - RNA, 19 nt, synthetic construct
  source 1..19: mol_type = other RNA
ngaaacaattgaacgaaac

SEQ ID NO: 716 - RNA, 19 nt, synthetic construct
  source 1..19: mol_type = other RNA
natatcttgcttttatagt

SEQ ID NO: 717 - RNA, 19 nt, synthetic construct
  source 1..19: mol_type = other RNA
ngagattgtcagatccaat

SEQ ID NO: 718 - RNA, 19 nt, synthetic construct
  source 1..19: mol_type = other RNA
ngcaattccatttatcaac

SEQ ID NO: 719 - RNA, 19 nt, synthetic construct
  source 1..19: mol_type = other RNA
ntatcaggataacttttaa

SEQ ID NO: 720 - RNA, 19 nt, synthetic construct
  source 1..19: mol_type = other RNA
ngaatttctggcttgctta

SEQ ID NO: 721 - RNA, 19 nt, synthetic construct
  source 1..19: mol_type = other RNA
ncaagttcagactggtgag

SEQ ID NO: 722 - RNA, 19 nt, synthetic construct
  source 1..19: mol_type = other RNA
ngaggtactggttttgtga

SEQ ID NO: 723 - RNA, 19 nt, synthetic construct
  source 1..19: mol_type = other RNA
ngtattttctttcaagcaa

SEQ ID NO: 724 - RNA, 19 nt, synthetic construct
  source 1..19: mol_type = other RNA
nggtactggttttgtgaac

SEQ ID NO: 725 - RNA, 19 nt, synthetic construct
  source 1..19: mol_type = other RNA
nagattccctccacagcag

SEQ ID NO: 726 - RNA, 19 nt, synthetic construct
  source 1..19: mol_type = other RNA
nagtcagcatttctgtagg

SEQ ID NO: 727 - RNA, 19 nt, synthetic construct
  source 1..19: mol_type = other RNA
nttagcacggagctggctt

SEQ ID NO: 728 - RNA, 19 nt, synthetic construct
  source 1..19: mol_type = other RNA
naagagacacagtttggcc

SEQ ID NO: 729 - RNA, 19 nt, synthetic construct
  source 1..19: mol_type = other RNA
naacatgttgtgtctctag

SEQ ID NO: 730 - RNA, 19 nt, synthetic construct
  source 1..19: mol_type = other RNA
nataagtgcaaactgtatg

SEQ ID NO: 731 - RNA, 19 nt, synthetic construct
  source 1..19: mol_type = other RNA
naaattcagtttgtaggga

SEQ ID NO: 732 - RNA, 19 nt, synthetic construct
  source 1..19: mol_type = other RNA
ncaagcagtccttttacac

SEQ ID NO: 733 - RNA, 19 nt, synthetic construct
  source 1..19: mol_type = other RNA
nagtattcccaaaaggccc

SEQ ID NO: 734 - RNA, 19 nt, synthetic construct
  source 1..19: mol_type = other RNA
naatcacagtaaaggctgt

SEQ ID NO: 735 - RNA, 19 nt, synthetic construct
  source 1..19: mol_type = other RNA
natagctttcccttttgac

SEQ ID NO: 736 - RNA, 19 nt, synthetic construct
  source 1..19: mol_type = other RNA
nattggttgatactgtgaa

SEQ ID NO: 737 - RNA, 19 nt, synthetic construct
  source 1..19: mol_type = other RNA
nagaaatggccaatgtaaa

SEQ ID NO: 738 - RNA, 19 nt, synthetic construct
  source 1..19: mol_type = other RNA
ntgtaatcagagtttccgt

SEQ ID NO: 739 - RNA, 19 nt, synthetic construct
  source 1..19: mol_type = other RNA
nctcaggctttaatgatca

SEQ ID NO: 740 - RNA, 19 nt, synthetic construct
  source 1..19: mol_type = other RNA
nagctatttcttctatctt

SEQ ID NO: 741 - RNA, 19 nt, synthetic construct
  source 1..19: mol_type = other RNA
ntatcttgcttttatagta

SEQ ID NO: 742 - RNA, 19 nt, synthetic construct
  source 1..19: mol_type = other RNA
ncaaggttcatcattttct

SEQ ID NO: 743 - RNA, 19 nt, synthetic construct
  source 1..19: mol_type = other RNA
nttgtgttttgcattgctg

SEQ ID NO: 744 - RNA, 19 nt, synthetic construct
  source 1..19: mol_type = other RNA
nccacaataaagaattaca

SEQ ID NO: 745 - RNA, 19 nt, synthetic construct
  source 1..19: mol_type = other RNA
ngtggattacctttaacca

SEQ ID NO: 746 - RNA, 19 nt, synthetic construct
  source 1..19: mol_type = other RNA
nttctctcttcaaagctga

SEQ ID NO: 747 - RNA, 19 nt, synthetic construct
  source 1..19: mol_type = other RNA
ngggatgcttcaatatcct

SEQ ID NO: 748 - RNA, 19 nt, synthetic construct
  source 1..19: mol_type = other RNA
naatcttctaaactgtagt

SEQ ID NO: 749 - RNA, 19 nt, synthetic construct
  source 1..19: mol_type = other RNA
naattcagtttgtagggag

SEQ ID NO: 750 - RNA, 19 nt, synthetic construct
  source 1..19: mol_type = other RNA
ntgtcattttataattatg

SEQ ID NO: 751 - RNA, 19 nt, synthetic construct
  source 1..19: mol_type = other RNA
natgctttgatacaacttc

SEQ ID NO: 752 - RNA, 19 nt, synthetic construct
  source 1..19: mol_type = other RNA
ncctctttatatttagcct

SEQ ID NO: 753 - RNA, 19 nt, synthetic construct
  source 1..19: mol_type = other RNA
ncaaattcatctaaattag

SEQ ID NO: 754 - RNA, 19 nt, synthetic construct
  source 1..19: mol_type = other RNA
ntccaaatacacataagaa

SEQ ID NO: 755 - RNA, 14 nt, synthetic construct
  source 1..14: mol_type = other RNA
aggccaaactgtgt

SEQ ID NO: 756 - RNA, 14 nt, synthetic construct
  source 1..14: mol_type = other RNA
gacttcaagattcc

SEQ ID NO: 757 - RNA, 14 nt, synthetic construct
  source 1..14: mol_type = other RNA
agctacaagcccag

SEQ ID NO: 758 - RNA, 14 nt, synthetic construct
  source 1..14: mol_type = other RNA
ctataattacttga

SEQ ID NO: 759 - RNA, 14 nt, synthetic construct
  source 1..14: mol_type = other RNA
agacaaacctgttt

SEQ ID NO: 760 - RNA, 14 nt, synthetic construct
  source 1..14: mol_type = other RNA
gttaaaatgtctgc

SEQ ID NO: 761 - RNA, 14 nt, synthetic construct
  source 1..14: mol_type = other RNA
aaccagctccaggt

SEQ ID NO: 762 - RNA, 14 nt, synthetic construct
  source 1..14: mol_type = other RNA
tacttgattttatc

SEQ ID NO: 763 - RNA, 14 nt, synthetic construct
  source 1..14: mol_type = other RNA
ggccaaactgtgtc

SEQ ID NO: 764 - RNA, 14 nt, synthetic construct
  source 1..14: mol_type = other RNA
acttcaagattccg

SEQ ID NO: 765 - RNA, 14 nt, synthetic construct
  source 1..14: mol_type = other RNA
gtgttaaaatgtct

SEQ ID NO: 766 - RNA, 14 nt, synthetic construct
  source 1..14: mol_type = other RNA
ttttcctgacttca

SEQ ID NO: 767 - RNA, 14 nt, synthetic construct
  source 1..14: mol_type = other RNA
caggccaaactgtg

SEQ ID NO: 768 - RNA, 14 nt, synthetic construct
  source 1..14: mol_type = other RNA
aactcactataatt

SEQ ID NO: 769 - RNA, 14 nt, synthetic construct
  source 1..14: mol_type = other RNA
acatctgacttgga

SEQ ID NO: 770 - RNA, 14 nt, synthetic construct
  source 1..14: mol_type = other RNA
atctcttttcctga

SEQ ID NO: 771 - RNA, 14 nt, synthetic construct
  source 1..14: mol_type = other RNA
gaatatgtcttgcc

SEQ ID NO: 772 - RNA, 14 nt, synthetic construct
  source 1..14: mol_type = other RNA
ggaaattggccttc

SEQ ID NO: 773 - RNA, 14 nt, synthetic construct
  source 1..14: mol_type = other RNA
actataattacttg

SEQ ID NO: 774 - RNA, 14 nt, synthetic construct
  source 1..14: mol_type = other RNA
ttacttgattttat

SEQ ID NO: 775 - RNA, 14 nt, synthetic construct
  source 1..14: mol_type = other RNA
tataattacttgat

SEQ ID NO: 776 - RNA, 14 nt, synthetic construct
  source 1..14: mol_type = other RNA
ctctggaaattggc

SEQ ID NO: 777 - RNA, 14 nt, synthetic construct
  source 1..14: mol_type = other RNA
tcactataattact

SEQ ID NO: 778 - RNA, 14 nt, synthetic construct
  source 1..14: mol_type = other RNA
aacaagtaccttta

SEQ ID NO: 779 - RNA, 14 nt, synthetic construct
  source 1..14: mol_type = other RNA
ctgaaacagcagtc

SEQ ID NO: 780 - RNA, 14 nt, synthetic construct
  source 1..14: mol_type = other RNA
tctgaaacagcagt

SEQ ID NO: 781 - RNA, 14 nt, synthetic construct
  source 1..14: mol_type = other RNA
aagtacctttatat

SEQ ID NO: 782 - RNA, 14 nt, synthetic construct
  source 1..14: mol_type = other RNA
aggaactgtttaca

SEQ ID NO: 783 - RNA, 14 nt, synthetic construct
  source 1..14: mol_type = other RNA
cagccaaagttacc

SEQ ID NO: 784 - RNA, 14 nt, synthetic construct
  source 1..14: mol_type = other RNA
tgtttacaactata

SEQ ID NO: 785 - RNA, 14 nt, synthetic construct
  source 1..14: mol_type = other RNA
gttaaagaatatgt

SEQ ID NO: 786 - RNA, 14 nt, synthetic construct
  source 1..14: mol_type = other RNA
taaaaggactgctt

SEQ ID NO: 787 - RNA, 14 nt, synthetic construct
  source 1..14: mol_type = other RNA
aaaataactcacta

SEQ ID NO: 788 - RNA, 14 nt, synthetic construct
  source 1..14: mol_type = other RNA
aaagatgtcttcct

SEQ ID NO: 789 - RNA, 14 nt, synthetic construct
  source 1..14: mol_type = other RNA
tgtaaaaggactgc

SEQ ID NO: 790 - RNA, 14 nt, synthetic construct
  source 1..14: mol_type = other RNA
ttgacaaaataact

SEQ ID NO: 791 - RNA, 14 nt, synthetic construct
  source 1..14: mol_type = other RNA
atattctgttgtac

SEQ ID NO: 792 - RNA, 14 nt, synthetic construct
  source 1..14: mol_type = other RNA
attgacaaaataac

SEQ ID NO: 793 - RNA, 14 nt, synthetic construct
  source 1..14: mol_type = other RNA
tttcctgaagcctg

SEQ ID NO: 794 - RNA, 14 nt, synthetic construct
  source 1..14: mol_type = other RNA
ttatctcttttcct

SEQ ID NO: 795 - RNA, 14 nt, synthetic construct
  source 1..14: mol_type = other RNA
atattgctgtaaca

SEQ ID NO: 796 - RNA, 14 nt, synthetic construct
  source 1..14: mol_type = other RNA
tgcatatgcttata

SEQ ID NO: 797 - RNA, 14 nt, synthetic construct
  source 1..14: mol_type = other RNA
agttaaagaatatg

SEQ ID NO: 798 - RNA, 14 nt, synthetic construct
  source 1..14: mol_type = other RNA
ttcaaagatgtctt

SEQ ID NO: 799 - RNA, 14 nt, synthetic construct
  source 1..14: mol_type = other RNA
agatgtcttcctgg

SEQ ID NO: 800 - RNA, 14 nt, synthetic construct
  source 1..14: mol_type = other RNA
tttatattgctgta

SEQ ID NO: 801 - RNA, 14 nt, synthetic construct
  source 1..14: mol_type = other RNA
aacctatgacaatg

SEQ ID NO: 802 - RNA, 14 nt, synthetic construct
  source 1..14: mol_type = other RNA
gacaaaataactca

SEQ ID NO: 803 - RNA, 14 nt, synthetic construct
  source 1..14: mol_type = other RNA
caaaataactcact

SEQ ID NO: 804 - RNA, 14 nt, synthetic construct
  source 1..14: mol_type = other RNA
acaaaataactcac

SEQ ID NO: 805 - RNA, 14 nt, synthetic construct
  source 1..14: mol_type = other RNA
ttcaaggaaaattc

SEQ ID NO: 806 - RNA, 14 nt, synthetic construct
  source 1..14: mol_type = other RNA
attgctgtaacagt

SEQ ID NO: 807 - RNA, 14 nt, synthetic construct
  source 1..14: mol_type = other RNA
atgacaatggattt

SEQ ID NO: 808 - RNA, 14 nt, synthetic construct
  source 1..14: mol_type = other RNA
tatgacaatggatt

SEQ ID NO: 809 - RNA, 14 nt, synthetic construct
  source 1..14: mol_type = other RNA
acaatggatttctc

SEQ ID NO: 810 - RNA, 14 nt, synthetic construct
  source 1..14: mol_type = other RNA
aaagaatatgtctt

SEQ ID NO: 811 - RNA, 14 nt, synthetic construct
  source 1..14: mol_type = other RNA
gggaatctgcactt

SEQ ID NO: 812 - RNA, 14 nt, synthetic construct
  source 1..14: mol_type = other RNA
ctatgacaatggat

SEQ ID NO: 813 - RNA, 14 nt, synthetic construct
  source 1..14: mol_type = other RNA
gttcaaagatgtct

SEQ ID NO: 814 - RNA, 14 nt, synthetic construct
  source 1..14: mol_type = other RNA
acctatgacaatgg

SEQ ID NO: 815 - RNA, 14 nt, synthetic construct
  source 1..14: mol_type = other RNA
tggatttctcttca

SEQ ID NO: 816 - RNA, 14 nt, synthetic construct
  source 1..14: mol_type = other RNA
ttaaagaatatgtc

SEQ ID NO: 817 - RNA, 14 nt, synthetic construct
  source 1..14: mol_type = other RNA
gtgtaaaaggactg

SEQ ID NO: 818 - RNA, 14 nt, synthetic construct
  source 1..14: mol_type = other RNA
tttcaaggaaaatt

SEQ ID NO: 819 - RNA, 14 nt, synthetic construct
  source 1..14: mol_type = other RNA
aaaatacaatttca

SEQ ID NO: 820 - RNA, 14 nt, synthetic construct
  source 1..14: mol_type = other RNA
attttgaaattact

SEQ ID NO: 821 - RNA, 14 nt, synthetic construct
  source 1..14: mol_type = other RNA
ctttaagaattttg

SEQ ID NO: 822 - RNA, 14 nt, synthetic construct
  source 1..14: mol_type = other RNA
agaaccaaaattca

SEQ ID NO: 823 - RNA, 14 nt, synthetic construct
  source 1..14: mol_type = other RNA
attataaaatgaca

SEQ ID NO: 824 - RNA, 14 nt, synthetic construct
  source 1..14: mol_type = other RNA
agtacaggatttgg

SEQ ID NO: 825 - RNA, 14 nt, synthetic construct
  source 1..14: mol_type = other RNA
attaaaagttatcc

SEQ ID NO: 826 - RNA, 14 nt, synthetic construct
  source 1..14: mol_type = other RNA
agagaagacttaaa

SEQ ID NO: 827 - RNA, 14 nt, synthetic construct
  source 1..14: mol_type = other RNA
atattggaattatc

SEQ ID NO: 828 - RNA, 14 nt, synthetic construct
  source 1..14: mol_type = other RNA
atgttcatttatcc

SEQ ID NO: 829 - RNA, 14 nt, synthetic construct
  source 1..14: mol_type = other RNA
aatgatgaaccttg

SEQ ID NO: 830 - RNA, 14 nt, synthetic construct
  source 1..14: mol_type = other RNA
ttatagcacttcca

SEQ ID NO: 831 - RNA, 14 nt, synthetic construct
  source 1..14: mol_type = other RNA
ttaagagtacttgg

SEQ ID NO: 832 - RNA, 14 nt, synthetic construct
  source 1..14: mol_type = other RNA
aggaaatcattgga

SEQ ID NO: 833 - RNA, 14 nt, synthetic construct
  source 1..14: mol_type = other RNA
atgaatataccata

SEQ ID NO: 834 - RNA, 14 nt, synthetic construct
  source 1..14: mol_type = other RNA
agttcatcttgttc

SEQ ID NO: 835 - RNA, 14 nt, synthetic construct
  source 1..14: mol_type = other RNA
attcctgaagttca

SEQ ID NO: 836 - RNA, 14 nt, synthetic construct
  source 1..14: mol_type = other RNA
ataagagaagactt

SEQ ID NO: 837 - RNA, 14 nt, synthetic construct
  source 1..14: mol_type = other RNA
aagtataaacattc

SEQ ID NO: 838 - RNA, 14 nt, synthetic construct
  source 1..14: mol_type = other RNA
gtgtacgattccgg

SEQ ID NO: 839 - RNA, 14 nt, synthetic construct
  source 1..14: mol_type = other RNA
agagcagaggtatg

SEQ ID NO: 840 - RNA, 14 nt, synthetic construct
  source 1..14: mol_type = other RNA
agaagaaattgatc

SEQ ID NO: 841 - RNA, 14 nt, synthetic construct
  source 1..14: mol_type = other RNA
aaaacacaatgttg

SEQ ID NO: 842 - RNA, 14 nt, synthetic construct
  source 1..14: mol_type = other RNA
tgcttataaagtta

SEQ ID NO: 843 - RNA, 14 nt, synthetic construct
  source 1..14: mol_type = other RNA
taaaagttatcctg

SEQ ID NO: 844 - RNA, 14 nt, synthetic construct
  source 1..14: mol_type = other RNA
atcaaccaataaaa

SEQ ID NO: 845 - RNA, 14 nt, synthetic construct
  source 1..14: mol_type = other RNA
agaaaacagttgca

SEQ ID NO: 846 - RNA, 14 nt, synthetic construct
  source 1..14: mol_type = other RNA
gttgtatcaaagca

SEQ ID NO: 847 - RNA, 14 nt, synthetic construct
  source 1..14: mol_type = other RNA
gagagaagctttgg

SEQ ID NO: 848 - RNA, 14 nt, synthetic construct
  source 1..14: mol_type = other RNA
cgaaaggagttccc

SEQ ID NO: 849 - RNA, 14 nt, synthetic construct
  source 1..14: mol_type = other RNA
aaagaactgtcata

SEQ ID NO: 850 - RNA, 14 nt, synthetic construct
  source 1..14: mol_type = other RNA
atgttattctgcaa

SEQ ID NO: 851 - RNA, 14 nt, synthetic construct
  source 1..14: mol_type = other RNA
ctataggacttctg

SEQ ID NO: 852 - RNA, 14 nt, synthetic construct
  source 1..14: mol_type = other RNA
tattaaaagttatc

SEQ ID NO: 853 - RNA, 14 nt, synthetic construct
  source 1..14: mol_type = other RNA
aaagaaatcttagt

SEQ ID NO: 854 - RNA, 14 nt, synthetic construct
  source 1..14: mol_type = other RNA
catgttcatttatc

SEQ ID NO: 855 - RNA, 14 nt, synthetic construct
  source 1..14: mol_type = other RNA
acaacatgttcatc

SEQ ID NO: 856 - RNA, 14 nt, synthetic construct
  source 1..14: mol_type = other RNA
ttaaaagatgatca

SEQ ID NO: 857 - RNA, 14 nt, synthetic construct
  source 1..14: mol_type = other RNA
aaatggaattgctc

SEQ ID NO: 858 - RNA, 14 nt, synthetic construct
  source 1..14: mol_type = other RNA
aaggaaaattcaca

SEQ ID NO: 859 - RNA, 14 nt, synthetic construct
  source 1..14: mol_type = other RNA
tttaagaattttga

SEQ ID NO: 860 - RNA, 14 nt, synthetic construct
  source 1..14: mol_type = other RNA
ggtgctggagttta

SEQ ID NO: 861 - RNA, 14 nt, synthetic construct
  source 1..14: mol_type = other RNA
acttccaatatcaa

SEQ ID NO: 862 - RNA, 14 nt, synthetic construct
  source 1..14: mol_type = other RNA
aacactgaatgcac

SEQ ID NO: 863 - RNA, 14 nt, synthetic construct
  source 1..14: mol_type = other RNA
aaagtataaacatt

SEQ ID NO: 864 - RNA, 14 nt, synthetic construct
  source 1..14: mol_type = other RNA
ataaaatacaattt

SEQ ID NO: 865 - RNA, 14 nt, synthetic construct
  source 1..14: mol_type = other RNA
taagagaagactta

SEQ ID NO: 866 - RNA, 14 nt, synthetic construct
  source 1..14: mol_type = other RNA
actataggacttct

SEQ ID NO: 867 - RNA, 14 nt, synthetic construct
  source 1..14: mol_type = other RNA
actataaaagcaag

SEQ ID NO: 868 - RNA, 14 nt, synthetic construct
  source 1..14: mol_type = other RNA
aaacacaatgttga

SEQ ID NO: 869 - RNA, 14 nt, synthetic construct
  source 1..14: mol_type = other RNA
agaaacaactgcct

SEQ ID NO: 870 - RNA, 14 nt, synthetic construct
  source 1..14: mol_type = other RNA
agaaattgatcata

SEQ ID NO: 871 - RNA, 14 nt, synthetic construct
  source 1..14: mol_type = other RNA
aattttgaaattac

SEQ ID NO: 872 - RNA, 14 nt, synthetic construct
  source 1..14: mol_type = other RNA
aacacaatgttgat

SEQ ID NO: 873 - RNA, 14 nt, synthetic construct
  source 1..14: mol_type = other RNA
ttgggaatactttg

SEQ ID NO: 874 - RNA, 14 nt, synthetic construct
  source 1..14: mol_type = other RNA
gtgtaccatgtttt

SEQ ID NO: 875 - RNA, 14 nt, synthetic construct
  source 1..14: mol_type = other RNA
atgcagttctgtgt

SEQ ID NO: 876 - RNA, 14 nt, synthetic construct
  source 1..14: mol_type = other RNA
taagagtacttgga

SEQ ID NO: 877 - RNA, 14 nt, synthetic construct
  source 1..14: mol_type = other RNA
actgtcatactaca

SEQ ID NO: 878 - RNA, 14 nt, synthetic construct
  source 1..14: mol_type = other RNA
ggaaagctattctg

SEQ ID NO: 879 - RNA, 14 nt, synthetic construct
  source 1..14: mol_type = other RNA
attactataaaagc

SEQ ID NO: 880 - RNA, 14 nt, synthetic construct
  source 1..14: mol_type = other RNA
gatggagtagcttc

SEQ ID NO: 881 - RNA, 14 nt, synthetic construct
  source 1..14: mol_type = other RNA
tagaattagtggca

SEQ ID NO: 882 - RNA, 14 nt, synthetic construct
  source 1..14: mol_type = other RNA
gtcatagagtctac

SEQ ID NO: 883 - RNA, 14 nt, synthetic construct
  source 1..14: mol_type = other RNA
aaaagaaatcttag

SEQ ID NO: 884 - RNA, 14 nt, synthetic construct
  source 1..14: mol_type = other RNA
ctggttaaatattg

SEQ ID NO: 885 - RNA, 14 nt, synthetic construct
  source 1..14: mol_type = other RNA
ttttgaaattacta

SEQ ID NO: 886 - RNA, 14 nt, synthetic construct
  source 1..14: mol_type = other RNA
attatctcttttcc

SEQ ID NO: 887 - RNA, 14 nt, synthetic construct
  source 1..14: mol_type = other RNA
gtgtcaagcatttt

SEQ ID NO: 888 - RNA, 14 nt, synthetic construct
  source 1..14: mol_type = other RNA
tggaaatgaatata

SEQ ID NO: 889 - RNA, 14 nt, synthetic construct
  source 1..14: mol_type = other RNA
acttgcttttatta

SEQ ID NO: 890 - RNA, 14 nt, synthetic construct
  source 1..14: mol_type = other RNA
acaaacgcatagta

SEQ ID NO: 891 - RNA, 14 nt, synthetic construct
  source 1..14: mol_type = other RNA
gagtatttcaattc

SEQ ID NO: 892 - RNA, 14 nt, synthetic construct
  source 1..14: mol_type = other RNA
aaaagttatcctga

SEQ ID NO: 893 - RNA, 14 nt, synthetic construct
  source 1..14: mol_type = other RNA
atttggaagttgta

SEQ ID NO: 894 - RNA, 14 nt, synthetic construct
  source 1..14: mol_type = other RNA
attagagaatgatt

SEQ ID NO: 895 - RNA, 14 nt, synthetic construct
  source 1..14: mol_type = other RNA
agggaaagctattc

SEQ ID NO: 896 - RNA, 14 nt, synthetic construct
  source 1..14: mol_type = other RNA
agacaagaatttcc

SEQ ID NO: 897 - RNA, 14 nt, synthetic construct
  source 1..14: mol_type = other RNA
gaaccaaaattcaa

SEQ ID NO: 898 - RNA, 14 nt, synthetic construct
  source 1..14: mol_type = other RNA
ttgtaaagctcact

SEQ ID NO: 899 - RNA, 14 nt, synthetic construct
  source 1..14: mol_type = other RNA
agtgtaccatgttt

SEQ ID NO: 900 - RNA, 14 nt, synthetic construct
  source 1..14: mol_type = other RNA
agtcatagagtcta

SEQ ID NO: 901 - RNA, 14 nt, synthetic construct
  source 1..14: mol_type = other RNA
gactcccaagaaaa

SEQ ID NO: 902 - RNA, 14 nt, synthetic construct
  source 1..14: mol_type = other RNA
atctccttgcctac

SEQ ID NO: 903 - RNA, 14 nt, synthetic construct
  source 1..14: mol_type = other RNA
atggaggtggcttt

SEQ ID NO: 904 - RNA, 14 nt, synthetic construct
  source 1..14: mol_type = other RNA
gaaaagaaatctta

SEQ ID NO: 905 - RNA, 14 nt, synthetic construct
  source 1..14: mol_type = other RNA
aagtttgcagcttt

SEQ ID NO: 906 - RNA, 14 nt, synthetic construct
  source 1..14: mol_type = other RNA
ttgcttttattaga

SEQ ID NO: 907 - RNA, 14 nt, synthetic construct
  source 1..14: mol_type = other RNA
tgcacaaacaattg

SEQ ID NO: 908 - RNA, 14 nt, synthetic construct
  source 1..14: mol_type = other RNA
agagaagctttggt

SEQ ID NO: 909 - RNA, 14 nt, synthetic construct
  source 1..14: mol_type = other RNA
aagaaaacagttgc

SEQ ID NO: 910 - RNA, 14 nt, synthetic construct
  source 1..14: mol_type = other RNA
ttgtatcaaagcat

SEQ ID NO: 911 - RNA, 14 nt, synthetic construct
  source 1..14: mol_type = other RNA
aatttagatgaatt

SEQ ID NO: 912 - RNA, 14 nt, synthetic construct
  source 1..14: mol_type = other RNA
attacatcgtcaca

SEQ ID NO: 913 - RNA, 14 nt, synthetic construct
  source 1..14: mol_type = other RNA
ataaacagtgtacc

SEQ ID NO: 914 - RNA, 14 nt, synthetic construct
  source 1..14: mol_type = other RNA
agtacaaggcaacc

SEQ ID NO: 915 - RNA, 14 nt, synthetic construct
  source 1..14: mol_type = other RNA
aagaatttccttgg

SEQ ID NO: 916 - RNA, 14 nt, synthetic construct
  source 1..14: mol_type = other RNA
ttcagtctggttaa

SEQ ID NO: 917 - RNA, 14 nt, synthetic construct
  source 1..14: mol_type = other RNA
agaaatagctgcta

SEQ ID NO: 918 - RNA, 14 nt, synthetic construct
  source 1..14: mol_type = other RNA
atctacaaaactgg

SEQ ID NO: 919 - RNA, 14 nt, synthetic construct
  source 1..14: mol_type = other RNA
aacaggaaatcatt

SEQ ID NO: 920 - RNA, 14 nt, synthetic construct
  source 1..14: mol_type = other RNA
gtgagatcttgtct

SEQ ID NO: 921 - RNA, 14 nt, synthetic construct
  source 1..14: mol_type = other RNA
taaaggtaatccac

SEQ ID NO: 922 - RNA, 14 nt, synthetic construct
  source 1..14: mol_type = other RNA
aattcacagtatca

SEQ ID NO: 923 - RNA, 14 nt, synthetic construct
  source 1..14: mol_type = other RNA
gttgtcccagtatt

SEQ ID NO: 924 - RNA, 14 nt, synthetic construct
  source 1..14: mol_type = other RNA
agtacttaattatg

SEQ ID NO: 925 - RNA, 14 nt, synthetic construct
  source 1..14: mol_type = other RNA
tctgaggaagtttg

SEQ ID NO: 926 - RNA, 14 nt, synthetic construct
  source 1..14: mol_type = other RNA
aataacatggcctt

SEQ ID NO: 927 - RNA, 14 nt, synthetic construct
  source 1..14: mol_type = other RNA
gcatacagtttgca

SEQ ID NO: 928 - RNA, 14 nt, synthetic construct
  source 1..14: mol_type = other RNA
gggaaagctattct

SEQ ID NO: 929 - RNA, 14 nt, synthetic construct
  source 1..14: mol_type = other RNA
gaaaattcacagta

SEQ ID NO: 930 - RNA, 14 nt, synthetic construct
  source 1..14: mol_type = other RNA
ctctttgaagttgg

SEQ ID NO: 931 - RNA, 14 nt, synthetic construct
  source 1..14: mol_type = other RNA
atatcaaaattcag

SEQ ID NO: 932 - RNA, 14 nt, synthetic construct
  source 1..14: mol_type = other RNA
atcttacagccttt

SEQ ID NO: 933 - RNA, 14 nt, synthetic construct
  source 1..14: mol_type = other RNA
tactataaaagcaa

SEQ ID NO: 934 - RNA, 14 nt, synthetic construct
  source 1..14: mol_type = other RNA
aagagtacttggac

SEQ ID NO: 935 - RNA, 14 nt, synthetic construct
  source 1..14: mol_type = other RNA
agcagaattagtgt

SEQ ID NO: 936 - RNA, 14 nt, synthetic construct
  source 1..14: mol_type = other RNA
agtaagcaagccag

SEQ ID NO: 937 - RNA, 14 nt, synthetic construct
  source 1..14: mol_type = other RNA
aagtacaaggcaac

SEQ ID NO: 938 - RNA, 14 nt, synthetic construct
  source 1..14: mol_type = other RNA
ctacagaaatgctg

SEQ ID NO: 939 - RNA, 14 nt, synthetic construct
  source 1..14: mol_type = other RNA
ttatcaaagtataa

SEQ ID NO: 940 - RNA, 14 nt, synthetic construct
  source 1..14: mol_type = other RNA
aagacagtacttaa

SEQ ID NO: 941 - RNA, 14 nt, synthetic construct
  source 1..14: mol_type = other RNA
gaggaagtttgcag

SEQ ID NO: 942 - RNA, 14 nt, synthetic construct
  source 1..14: mol_type = other RNA
agagaaactgtctt

SEQ ID NO: 943 - RNA, 14 nt, synthetic construct
  source 1..14: mol_type = other RNA
cctacaaactgaat

SEQ ID NO: 944 - RNA, 14 nt, synthetic construct
  source 1..14: mol_type = other RNA
gtataaacattcca

SEQ ID NO: 945 - RNA, 14 nt, synthetic construct
  source 1..14: mol_type = other RNA
tgaagaccctgtta

SEQ ID NO: 946 - RNA, 14 nt, synthetic construct
  source 1..14: mol_type = other RNA
atgcaacaatctct

SEQ ID NO: 947 - RNA, 14 nt, synthetic construct
  source 1..14: mol_type = other RNA
aatgcagatgactc

SEQ ID NO: 948 - RNA, 14 nt, synthetic construct
  source 1..14: mol_type = other RNA
aaatataaacattc

SEQ ID NO: 949 - RNA, 14 nt, synthetic construct
  source 1..14: mol_type = other RNA
gttcatcttgttcc

SEQ ID NO: 950 - RNA, 14 nt, synthetic construct
  source 1..14: mol_type = other RNA
gaggcagaaatacc

SEQ ID NO: 951 - RNA, 14 nt, synthetic construct
  source 1..14: mol_type = other RNA
gggatgcagttctg

SEQ ID NO: 952 - RNA, 14 nt, synthetic construct
  source 1..14: mol_type = other RNA
attggacaccggaa

SEQ ID NO: 953 - RNA, 14 nt, synthetic construct
  source 1..14: mol_type = other RNA
acaaacaattgatg

SEQ ID NO: 954 - RNA, 14 nt, synthetic construct
  source 1..14: mol_type = other RNA
ttggaaagagtatt

SEQ ID NO: 955 - RNA, 14 nt, synthetic construct
  source 1..14: mol_type = other RNA
actgaagcatttga

SEQ ID NO: 956 - RNA, 14 nt, synthetic construct
  source 1..14: mol_type = other RNA
agtggcacttgctt

SEQ ID NO: 957 - RNA, 14 nt, synthetic construct
  source 1..14: mol_type = other RNA
acaatctctattaa

SEQ ID NO: 958 - RNA, 14 nt, synthetic construct
  source 1..14: mol_type = other RNA
gcaacaatctctat

SEQ ID NO: 959 - RNA, 14 nt, synthetic construct
  source 1..14: mol_type = other RNA
gacgaaaggagttc

SEQ ID NO: 960 - RNA, 14 nt, synthetic construct
  source 1..14: mol_type = other RNA
aattataaaatgac

SEQ ID NO: 961 - RNA, 14 nt, synthetic construct
  source 1..14: mol_type = other RNA
gtatttcaattctt

SEQ ID NO: 962 - RNA, 14 nt, synthetic construct
  source 1..14: mol_type = other RNA
attagaaaggcttt

SEQ ID NO: 963 - RNA, 14 nt, synthetic construct
  source 1..14: mol_type = other RNA
tggttaaatattga

SEQ ID NO: 964 - RNA, 14 nt, synthetic construct
  source 1..14: mol_type = other RNA
aaatgaatatacca

SEQ ID NO: 965 - RNA, 14 nt, synthetic construct
  source 1..14: mol_type = other RNA
gttcaattgtttca

SEQ ID NO: 966 - RNA, 14 nt, synthetic construct
  source 1..14: mol_type = other RNA
aaaagcaagatatt

SEQ ID NO: 967 - RNA, 14 nt, synthetic construct
  source 1..14: mol_type = other RNA
atctgacaatctct

SEQ ID NO: 968 - RNA, 14 nt, synthetic construct
  source 1..14: mol_type = other RNA
taaatggaattgct

SEQ ID NO: 969 - RNA, 14 nt, synthetic construct
  source 1..14: mol_type = other RNA
agttatcctgataa

SEQ ID NO: 970 - RNA, 14 nt, synthetic construct
  source 1..14: mol_type = other RNA
aagccagaaattcg

SEQ ID NO: 971 - RNA, 14 nt, synthetic construct
  source 1..14: mol_type = other RNA
cagtctgaacttga

SEQ ID NO: 972 - RNA, 14 nt, synthetic construct
  source 1..14: mol_type = other RNA
aaaccagtacctct

SEQ ID NO: 973 - RNA, 14 nt, synthetic construct
  source 1..14: mol_type = other RNA
tgaaagaaaatacc

SEQ ID NO: 974 - RNA, 14 nt, synthetic construct
  source 1..14: mol_type = other RNA
caaaaccagtacct

SEQ ID NO: 975 - RNA, 14 nt, synthetic construct
  source 1..14: mol_type = other RNA
gtggagggaatctg

SEQ ID NO: 976 - RNA, 14 nt, synthetic construct
  source 1..14: mol_type = other RNA
agaaatgctgacta

SEQ ID NO: 977 - RNA, 14 nt, synthetic construct
  source 1..14: mol_type = other RNA
agctccgtgctaat

SEQ ID NO: 978 - RNA, 14 nt, synthetic construct
  source 1..14: mol_type = other RNA
aactgtgtctctta

SEQ ID NO: 979 - RNA, 14 nt, synthetic construct
  source 1..14: mol_type = other RNA
gacacaacatgttc

SEQ ID NO: 980 - RNA, 14 nt, synthetic construct
  source 1..14: mol_type = other RNA
agtttgcacttatg

SEQ ID NO: 981 - RNA, 14 nt, synthetic construct
  source 1..14: mol_type = other RNA
acaaactgaatttg

SEQ ID NO: 982 - RNA, 14 nt, synthetic construct
  source 1..14: mol_type = other RNA
aaaggactgcttgt

SEQ ID NO: 983 - RNA, 14 nt, synthetic construct
  source 1..14: mol_type = other RNA
ttttgggaatactt

SEQ ID NO: 984 - RNA, 14 nt, synthetic construct
  source 1..14: mol_type = other RNA
ctttactgtgattg

SEQ ID NO: 985 - RNA, 14 nt, synthetic construct
  source 1..14: mol_type = other RNA
aagggaaagctatt

SEQ ID NO: 986 - RNA, 14 nt, synthetic construct
  source 1..14: mol_type = other RNA
agtatcaaccaata

SEQ ID NO: 987 - RNA, 14 nt, synthetic construct
  source 1..14: mol_type = other RNA
attggccatttctg

SEQ ID NO: 988 - RNA, 14 nt, synthetic construct
  source 1..14: mol_type = other RNA
aactctgattacaa

SEQ ID NO: 989 - RNA, 14 nt, synthetic construct
  source 1..14: mol_type = other RNA
attaaagcctgagt

SEQ ID NO: 990 - RNA, 14 nt, synthetic construct
  source 1..14: mol_type = other RNA
agaagaaatagctg

SEQ ID NO: 991 - RNA, 14 nt, synthetic construct
  source 1..14: mol_type = other RNA
taaaagcaagatat

SEQ ID NO: 992 - RNA, 14 nt, synthetic construct
  source 1..14: mol_type = other RNA
atgatgaaccttgt

SEQ ID NO: 993 - RNA, 14 nt, synthetic construct
  source 1..14: mol_type = other RNA
atgcaaaacacaat

SEQ ID NO: 994 - RNA, 14 nt, synthetic construct
  source 1..14: mol_type = other RNA
ttctttattgtggc

SEQ ID NO: 995 - RNA, 14 nt, synthetic construct
  source 1..14: mol_type = other RNA
aaaggtaatccacc

SEQ ID NO: 996 - RNA, 14 nt, synthetic construct
  source 1..14: mol_type = other RNA
tttgaagagagaag

SEQ ID NO: 997 - RNA, 14 nt, synthetic construct
  source 1..14: mol_type = other RNA
attgaagcatccca

SEQ ID NO: 998 - RNA, 14 nt, synthetic construct
  source 1..14: mol_type = other RNA
agtttagaagattt

SEQ ID NO: 999 - RNA, 14 nt, synthetic construct
  source 1..14: mol_type = other RNA
tacaaactgaattt

SEQ ID NO: 1000 - RNA, 14 nt, synthetic construct
  source 1..14: mol_type = other RNA
ttataaaatgacag

SEQ ID NO: 1001 - RNA, 14 nt, synthetic construct
  source 1..14: mol_type = other RNA
tgtatcaaagcatt

SEQ ID NO: 1002 - RNA, 14 nt, synthetic construct
  source 1..14: mol_type = other RNA
aaatataaagagga

SEQ ID NO: 1003 - RNA, 14 nt, synthetic construct
  source 1..14: mol_type = other RNA
ttagatgaatttgc

SEQ ID NO: 1004 - RNA, 14 nt, synthetic construct
  source 1..14: mol_type = other RNA
atgtgtatttggaa

SEQ ID NO: 1005 - RNA, 33 nt, synthetic construct
  source 1..33: mol_type = other RNA
acacagtttggcctggagaaggccaaactgtgt

SEQ ID NO: 1006 - RNA, 33 nt, synthetic construct
  source 1..33: mol_type = other RNA
ggaatcttgaagtcaggaagacttcaagattcc

SEQ ID NO: 1007 - RNA, 33 nt, synthetic construct
  source 1..33: mol_type = other RNA
ctgggcttgtagctggcacagctacaagcccag

SEQ ID NO: 1008 - RNA, 33 nt, synthetic construct
  source 1..33: mol_type = other RNA
tcaagtaattatagtgagtctataattacttga

SEQ ID NO: 1009 - RNA, 33 nt, synthetic construct
  source 1..33: mol_type = other RNA
aaacaggtttgtctgtatgagacaaacctgttt

SEQ ID NO: 1010 - RNA, 33 nt, synthetic construct
  source 1..33: mol_type = other RNA
gcagacattttaacacagagttaaaatgtctgc

SEQ ID NO: 1011 - RNA, 33 nt, synthetic construct
  source 1..33: mol_type = other RNA
acctggagctggttgccacaaccagctccaggt

SEQ ID NO: 1012 - RNA, 33 nt, synthetic construct
  source 1..33: mol_type = other RNA
gataaaatcaagtaattattacttgattttatc

SEQ ID NO: 1013 - RNA, 33 nt, synthetic construct
  source 1..33: mol_type = other RNA
gacacagtttggcctggagggccaaactgtgtc

SEQ ID NO: 1014 - RNA, 33 nt, synthetic construct
  source 1..33: mol_type = other RNA
cggaatcttgaagtcaggaacttcaagattccg

SEQ ID NO: 1015 - RNA, 33 nt, synthetic construct
  source 1..33: mol_type = other RNA
agacattttaacacagaacgtgttaaaatgtct

SEQ ID NO: 1016 - RNA, 33 nt, synthetic construct
  source 1..33: mol_type = other RNA
tgaagtcaggaaaagagatttttcctgacttca

SEQ ID NO: 1017 - RNA, 33 nt, synthetic construct
  source 1..33: mol_type = other RNA
cacagtttggcctggagaacaggccaaactgtg

SEQ ID NO: 1018 - RNA, 33 nt, synthetic construct
  source 1..33: mol_type = other RNA
aattatagtgagttattttaactcactataatt

SEQ ID NO: 1019 - RNA, 33 nt, synthetic construct
  source 1..33: mol_type = other RNA
tccaagtcagatgtctcttacatctgacttgga

SEQ ID NO: 1020 - RNA, 33 nt, synthetic construct
  source 1..33: mol_type = other RNA
tcaggaaaagagataattcatctcttttcctga

SEQ ID NO: 1021 - RNA, 33 nt, synthetic construct
  source 1..33: mol_type = other RNA
ggcaagacatattctttaagaatatgtcttgcc

SEQ ID NO: 1022 - RNA, 33 nt, synthetic construct
  source 1..33: mol_type = other RNA
gaaggccaatttccagaggggaaattggccttc

SEQ ID NO: 1023 - RNA, 33 nt, synthetic construct
  source 1..33: mol_type = other RNA
caagtaattatagtgagttactataattacttg

SEQ ID NO: 1024 - RNA, 33 nt, synthetic construct
  source 1..33: mol_type = other RNA
ataaaatcaagtaattatattacttgattttat

SEQ ID NO: 1025 - RNA, 33 nt, synthetic construct
  source 1..33: mol_type = other RNA
atcaagtaattatagtgagtataattacttgat

SEQ ID NO: 1026 - RNA, 33 nt, synthetic construct
  source 1..33: mol_type = other RNA
gccaatttccagaggaagcctctggaaattggc

SEQ ID NO: 1027 - RNA, 33 nt, synthetic construct
  source 1..33: mol_type = other RNA
agtaattatagtgagttattcactataattact

SEQ ID NO: 1028 - RNA, 33 nt, synthetic construct
  source 1..33: mol_type = other RNA
taaaggtacttgttgtttaaacaagtaccttta

SEQ ID NO: 1029 - RNA, 33 nt, synthetic construct
  source 1..33: mol_type = other RNA
gactgctgtttcagaatcactgaaacagcagtc

SEQ ID NO: 1030 - RNA, 33 nt, synthetic construct
  source 1..33: mol_type = other RNA
actgctgtttcagaatcaatctgaaacagcagt

SEQ ID NO: 1031 - RNA, 33 nt, synthetic construct
  source 1..33: mol_type = other RNA
atataaaggtacttgttgtaagtacctttatat

SEQ ID NO: 1032 - RNA, 33 nt, synthetic construct
  source 1..33: mol_type = other RNA
tgtaaacagttcctttcaaaggaactgtttaca

SEQ ID NO: 1033 - RNA, 33 nt, synthetic construct
  source 1..33: mol_type = other RNA
ggtaactttggctgagagacagccaaagttacc

SEQ ID NO: 1034 - RNA, 33 nt, synthetic construct
  source 1..33: mol_type = other RNA
tatagttgtaaacagttcctgtttacaactata

SEQ ID NO: 1035 - RNA, 33 nt, synthetic construct
  source 1..33: mol_type = other RNA
acatattctttaacttcaagttaaagaatatgt

SEQ ID NO: 1036 - RNA, 33 nt, synthetic construct
  source 1..33: mol_type = other RNA
aagcagtccttttacactctaaaaggactgctt

SEQ ID NO: 1037 - RNA, 33 nt, synthetic construct
  source 1..33: mol_type = other RNA
tagtgagttattttgtcaaaaaataactcacta

SEQ ID NO: 1038 - RNA, 33 nt, synthetic construct
  source 1..33: mol_type = other RNA
aggaagacatctttgaacaaaagatgtcttcct

SEQ ID NO: 1039 - RNA, 33 nt, synthetic construct
  source 1..33: mol_type = other RNA
gcagtccttttacactcaatgtaaaaggactgc

SEQ ID NO: 1040 - RNA, 33 nt, synthetic construct
  source 1..33: mol_type = other RNA
agttattttgtcaatatatttgacaaaataact

SEQ ID NO: 1041 - RNA, 33 nt, synthetic construct
  source 1..33: mol_type = other RNA
gtacaacagaatatggtatatattctgttgtac

SEQ ID NO: 1042 - RNA, 33 nt, synthetic construct
  source 1..33: mol_type = other RNA
gttattttgtcaatatatgattgacaaaataac

SEQ ID NO: 1043 - RNA, 33 nt, synthetic construct
  source 1..33: mol_type = other RNA
caggcttcaggaaaagaggtttcctgaagcctg

SEQ ID NO: 1044 - RNA, 33 nt, synthetic construct
  source 1..33: mol_type = other RNA
aggaaaagagataattccattatctcttttcct

SEQ ID NO: 1045 - RNA, 33 nt, synthetic construct
  source 1..33: mol_type = other RNA
tgttacagcaatataaaggatattgctgtaaca

SEQ ID NO: 1046 - RNA, 33 nt, synthetic construct
  source 1..33: mol_type = other RNA
tataagcatatgcaatctctgcatatgcttata

SEQ ID NO: 1047 - RNA, 33 nt, synthetic construct
  source 1..33: mol_type = other RNA
catattctttaacttcaaaagttaaagaatatg

SEQ ID NO: 1048 - RNA, 33 nt, synthetic construct
  source 1..33: mol_type = other RNA
aagacatctttgaacacctttcaaagatgtctt

SEQ ID NO: 1049 - RNA, 33 nt, synthetic construct
  source 1..33: mol_type = other RNA
ccaggaagacatctttgaaagatgtcttcctgg

SEQ ID NO: 1050 - RNA, 33 nt, synthetic construct
  source 1..33: mol_type = other RNA
tacagcaatataaaggtactttatattgctgta

SEQ ID NO: 1051 - RNA, 33 nt, synthetic construct
  source 1..33: mol_type = other RNA
cattgtcataggttattggaacctatgacaatg

SEQ ID NO: 1052 - RNA, 33 nt, synthetic construct
  source 1..33: mol_type = other RNA
tgagttattttgtcaatatgacaaaataactca

SEQ ID NO: 1053 - RNA, 33 nt, synthetic construct
  source 1..33: mol_type = other RNA
agtgagttattttgtcaatcaaaataactcact

SEQ ID NO: 1054 - RNA, 33 nt, synthetic construct
  source 1..33: mol_type = other RNA
gtgagttattttgtcaataacaaaataactcac

SEQ ID NO: 1055 - RNA, 33 nt, synthetic construct
  source 1..33: mol_type = other RNA
gaattttccttgaaagatcttcaaggaaaattc

SEQ ID NO: 1056 - RNA, 33 nt, synthetic construct
  source 1..33: mol_type = other RNA
actgttacagcaatataaaattgctgtaacagt

SEQ ID NO: 1057 - RNA, 33 nt, synthetic construct
  source 1..33: mol_type = other RNA
aaatccattgtcataggttatgacaatggattt

SEQ ID NO: 1058 - RNA, 33 nt, synthetic construct
  source 1..33: mol_type = other RNA
aatccattgtcataggttatatgacaatggatt

SEQ ID NO: 1059 - RNA, 33 nt, synthetic construct
  source 1..33: mol_type = other RNA
gagaaatccattgtcatagacaatggatttctc

SEQ ID NO: 1060 - RNA, 33 nt, synthetic construct
  source 1..33: mol_type = other RNA
aagacatattctttaacttaaagaatatgtctt

SEQ ID NO: 1061 - RNA, 33 nt, synthetic construct
  source 1..33: mol_type = other RNA
aagtgcagattccctccacgggaatctgcactt

SEQ ID NO: 1062 - RNA, 33 nt, synthetic construct
  source 1..33: mol_type = other RNA
atccattgtcataggttatctatgacaatggat

SEQ ID NO: 1063 - RNA, 33 nt, synthetic construct
  source 1..33: mol_type = other RNA
agacatctttgaacaccttgttcaaagatgtct

SEQ ID NO: 1064 - RNA, 33 nt, synthetic construct
  source 1..33: mol_type = other RNA
ccattgtcataggttattgacctatgacaatgg

SEQ ID NO: 1065 - RNA, 33 nt, synthetic construct
  source 1..33: mol_type = other RNA
tgaagagaaatccattgtctggatttctcttca

SEQ ID NO: 1066 - RNA, 33 nt, synthetic construct
  source 1..33: mol_type = other RNA
gacatattctttaacttcattaaagaatatgtc

SEQ ID NO: 1067 - RNA, 33 nt, synthetic construct
  source 1..33: mol_type = other RNA
cagtccttttacactcaaagtgtaaaaggactg

SEQ ID NO: 1068 - RNA, 33 nt, synthetic construct
  source 1..33: mol_type = other RNA
aattttccttgaaagatcctttcaaggaaaatt

SEQ ID NO: 1069 - RNA, 33 nt, synthetic construct
  source 1..33: mol_type = other RNA
tgaaattgtattttatctgaaaatacaatttca

SEQ ID NO: 1070 - RNA, 33 nt, synthetic construct
  source 1..33: mol_type = other RNA
agtaatttcaaaattcttaattttgaaattact

SEQ ID NO: 1071 - RNA, 33 nt, synthetic construct
  source 1..33: mol_type = other RNA
caaaattcttaaagttcttctttaagaattttg

SEQ ID NO: 1072 - RNA, 33 nt, synthetic construct
  source 1..33: mol_type = other RNA
tgaattttggttctgctctagaaccaaaattca

SEQ ID NO: 1073 - RNA, 33 nt, synthetic construct
  source 1..33: mol_type = other RNA
tgtcattttataattatgtattataaaatgaca

SEQ ID NO: 1074 - RNA, 33 nt, synthetic construct
  source 1..33: mol_type = other RNA
ccaaatcctgtactgacaaagtacaggatttgg

SEQ ID NO: 1075 - RNA, 33 nt, synthetic construct
  source 1..33: mol_type = other RNA
ggataacttttaatagagaattaaaagttatcc

SEQ ID NO: 1076 - RNA, 33 nt, synthetic construct
  source 1..33: mol_type = other RNA
tttaagtcttctcttattcagagaagacttaaa

SEQ ID NO: 1077 - RNA, 33 nt, synthetic construct
  source 1..33: mol_type = other RNA
gataattccaatatgatcaatattggaattatc

SEQ ID NO: 1078 - RNA, 33 nt, synthetic construct
  source 1..33: mol_type = other RNA
ggataaatgaacatggcctatgttcatttatcc

SEQ ID NO: 1079 - RNA, 33 nt, synthetic construct
  source 1..33: mol_type = other RNA
caaggttcatcattttcttaatgatgaaccttg

SEQ ID NO: 1080 - RNA, 33 nt, synthetic construct
  source 1..33: mol_type = other RNA
tggaagtgctataaaacatttatagcacttcca

SEQ ID NO: 1081 - RNA, 33 nt, synthetic construct
  source 1..33: mol_type = other RNA
ccaagtactcttaaagcaattaagagtacttgg

SEQ ID NO: 1082 - RNA, 33 nt, synthetic construct
  source 1..33: mol_type = other RNA
tccaatgatttcctgtttcaggaaatcattgga

SEQ ID NO: 1083 - RNA, 33 nt, synthetic construct
  source 1..33: mol_type = other RNA
tatggtatattcatttccaatgaatataccata

SEQ ID NO: 1084 - RNA, 33 nt, synthetic construct
  source 1..33: mol_type = other RNA
gaacaagatgaacttcccaagttcatcttgttc

SEQ ID NO: 1085 - RNA, 33 nt, synthetic construct
  source 1..33: mol_type = other RNA
tgaacttcaggaattttagattcctgaagttca

SEQ ID NO: 1086 - RNA, 33 nt, synthetic construct
  source 1..33: mol_type = other RNA
aagtcttctcttattccaaataagagaagactt

SEQ ID NO: 1087 - RNA, 33 nt, synthetic construct
  source 1..33: mol_type = other RNA
gaatgtttatactttgataaagtataaacattc

SEQ ID NO: 1088 - RNA, 33 nt, synthetic construct
  source 1..33: mol_type = other RNA
ccggaatcgtacacaaagggtgtacgattccgg

SEQ ID NO: 1089 - RNA, 33 nt, synthetic construct
  source 1..33: mol_type = other RNA
catacctctgctcttctgaagagcagaggtatg

SEQ ID NO: 1090 - RNA, 33 nt, synthetic construct
  source 1..33: mol_type = other RNA
gatcaatttcttctaccatagaagaaattgatc

SEQ ID NO: 1091 - RNA, 33 nt, synthetic construct
  source 1..33: mol_type = other RNA
caacattgtgttttgcattaaaacacaatgttg

SEQ ID NO: 1092 - RNA, 33 nt, synthetic construct
  source 1..33: mol_type = other RNA
taactttataagcatatgctgcttataaagtta

SEQ ID NO: 1093 - RNA, 33 nt, synthetic construct
  source 1..33: mol_type = other RNA
caggataacttttaatagataaaagttatcctg

SEQ ID NO: 1094 - RNA, 33 nt, synthetic construct
  source 1..33: mol_type = other RNA
ttttattggttgatactgtatcaaccaataaaa

SEQ ID NO: 1095 - RNA, 33 nt, synthetic construct
  source 1..33: mol_type = other RNA
tgcaactgttttcttctggagaaaacagttgca

SEQ ID NO: 1096 - RNA, 33 nt, synthetic construct
  source 1..33: mol_type = other RNA
tgctttgatacaacttccagttgtatcaaagca

SEQ ID NO: 1097 - RNA, 33 nt, synthetic construct
  source 1..33: mol_type = other RNA
ccaaagcttctctcttcaagagagaagctttgg

SEQ ID NO: 1098 - RNA, 33 nt, synthetic construct
  source 1..33: mol_type = other RNA
gggaactcctttcgtctgccgaaaggagttccc

SEQ ID NO: 1099 - RNA, 33 nt, synthetic construct
  source 1..33: mol_type = other RNA
tatgacagttctttgactgaaagaactgtcata

SEQ ID NO: 1100 - RNA, 33 nt, synthetic construct
  source 1..33: mol_type = other RNA
ttgcagaataacatgtccaatgttattctgcaa

SEQ ID NO: 1101 - RNA, 33 nt, synthetic construct
  source 1..33: mol_type = other RNA
cagaagtcctatagttgtactataggacttctg

SEQ ID NO: 1102 - RNA, 33 nt, synthetic construct
  source 1..33: mol_type = other RNA
gataacttttaatagagattattaaaagttatc

SEQ ID NO: 1103 - RNA, 33 nt, synthetic construct
  source 1..33: mol_type = other RNA
actaagatttcttttccaaaaagaaatcttagt

SEQ ID NO: 1104 - RNA, 33 nt, synthetic construct
  source 1..33: mol_type = other RNA
gataaatgaacatggcctgcatgttcatttatc

SEQ ID NO: 1105 - RNA, 33 nt, synthetic construct
  source 1..33: mol_type = other RNA
gatgaacatgttgtgtctcacaacatgttcatc

SEQ ID NO: 1106 - RNA, 33 nt, synthetic construct
  source 1..33: mol_type = other RNA
tgatcatcttttaagtcttttaaaagatgatca

SEQ ID NO: 1107 - RNA, 33 nt, synthetic construct
  source 1..33: mol_type = other RNA
gagcaattccatttatcaaaaatggaattgctc

SEQ ID NO: 1108 - RNA, 33 nt, synthetic construct
  source 1..33: mol_type = other RNA
tgtgaattttccttgaaagaaggaaaattcaca

SEQ ID NO: 1109 - RNA, 33 nt, synthetic construct
  source 1..33: mol_type = other RNA
tcaaaattcttaaagttcttttaagaattttga

SEQ ID NO: 1110 - RNA, 33 nt, synthetic construct
  source 1..33: mol_type = other RNA
taaactccagcaccgtcacggtgctggagttta

SEQ ID NO: 1111 - RNA, 33 nt, synthetic construct
  source 1..33: mol_type = other RNA
ttgatattggaagtgctatacttccaatatcaa

SEQ ID NO: 1112 - RNA, 33 nt, synthetic construct
  source 1..33: mol_type = other RNA
gtgcattcagtgttactggaacactgaatgcac

SEQ ID NO: 1113 - RNA, 33 nt, synthetic construct
  source 1..33: mol_type = other RNA
aatgtttatactttgataaaaagtataaacatt

SEQ ID NO: 1114 - RNA, 33 nt, synthetic construct
  source 1..33: mol_type = other RNA
aaattgtattttatctggaataaaatacaattt

SEQ ID NO: 1115 - RNA, 33 nt, synthetic construct
  source 1..33: mol_type = other RNA
taagtcttctcttattccataagagaagactta

SEQ ID NO: 1116 - RNA, 33 nt, synthetic construct
  source 1..33: mol_type = other RNA
agaagtcctatagttgtaaactataggacttct

SEQ ID NO: 1117 - RNA, 33 nt, synthetic construct
  source 1..33: mol_type = other RNA
cttgcttttatagtaatttactataaaagcaag

SEQ ID NO: 1118 - RNA, 33 nt, synthetic construct
  source 1..33: mol_type = other RNA
tcaacattgtgttttgcataaacacaatgttga

SEQ ID NO: 1119 - RNA, 33 nt, synthetic construct
  source 1..33: mol_type = other RNA
aggcagttgtttctaccatagaaacaactgcct

SEQ ID NO: 1120 - RNA, 33 nt, synthetic construct
  source 1..33: mol_type = other RNA
tatgatcaatttcttctacagaaattgatcata

SEQ ID NO: 1121 - RNA, 33 nt, synthetic construct
  source 1..33: mol_type = other RNA
gtaatttcaaaattcttaaaattttgaaattac

SEQ ID NO: 1122 - RNA, 33 nt, synthetic construct
  source 1..33: mol_type = other RNA
atcaacattgtgttttgcaaacacaatgttgat

SEQ ID NO: 1123 - RNA, 33 nt, synthetic construct
  source 1..33: mol_type = other RNA
caaagtattcccaaaaggcttgggaatactttg

SEQ ID NO: 1124 - RNA, 33 nt, synthetic construct
  source 1..33: mol_type = other RNA
aaaacatggtacactgtttgtgtaccatgtttt

SEQ ID NO: 1125 - RNA, 33 nt, synthetic construct
  source 1..33: mol_type = other RNA
acacagaactgcatcccagatgcagttctgtgt

SEQ ID NO: 1126 - RNA, 33 nt, synthetic construct
  source 1..33: mol_type = other RNA
tccaagtactcttaaagcataagagtacttgga

SEQ ID NO: 1127 - RNA, 33 nt, synthetic construct
  source 1..33: mol_type = other RNA
tgtagtatgacagttctttactgtcatactaca

SEQ ID NO: 1128 - RNA, 33 nt, synthetic construct
  source 1..33: mol_type = other RNA
cagaatagctttcccttttggaaagctattctg

SEQ ID NO: 1129 - RNA, 33 nt, synthetic construct
  source 1..33: mol_type = other RNA
gcttttatagtaatttcaaattactataaaagc

SEQ ID NO: 1130 - RNA, 33 nt, synthetic construct
  source 1..33: mol_type = other RNA
gaagctactccatcatcaagatggagtagcttc

SEQ ID NO: 1131 - RNA, 33 nt, synthetic construct
  source 1..33: mol_type = other RNA
tgccactaattctaagtaatagaattagtggca

SEQ ID NO: 1132 - RNA, 33 nt, synthetic construct
  source 1..33: mol_type = other RNA
gtagactctatgactgttagtcatagagtctac

SEQ ID NO: 1133 - RNA, 33 nt, synthetic construct
  source 1..33: mol_type = other RNA
ctaagatttcttttccaaaaaaagaaatcttag

SEQ ID NO: 1134 - RNA, 33 nt, synthetic construct
  source 1..33: mol_type = other RNA
caatatttaaccagactgactggttaaatattg

SEQ ID NO: 1135 - RNA, 33 nt, synthetic construct
  source 1..33: mol_type = other RNA
tagtaatttcaaaattcttttttgaaattacta

SEQ ID NO: 1136 - RNA, 33 nt, synthetic construct
  source 1..33: mol_type = other RNA
ggaaaagagataattccaaattatctcttttcc

SEQ ID NO: 1137 - RNA, 33 nt, synthetic construct
  source 1..33: mol_type = other RNA
aaaatgcttgacacgatgagtgtcaagcatttt

SEQ ID NO: 1138 - RNA, 33 nt, synthetic construct
  source 1..33: mol_type = other RNA
tatattcatttccaggaagtggaaatgaatata

SEQ ID NO: 1139 - RNA, 33 nt, synthetic construct
  source 1..33: mol_type = other RNA
taataaaagcaagtgccacacttgcttttatta

SEQ ID NO: 1140 - RNA, 33 nt, synthetic construct
  source 1..33: mol_type = other RNA
tactatgcgtttgtaatcaacaaacgcatagta

SEQ ID NO: 1141 - RNA, 33 nt, synthetic construct
  source 1..33: mol_type = other RNA
gaattgaaatactctttccgagtatttcaattc

SEQ ID NO: 1142 - RNA, 33 nt, synthetic construct
  source 1..33: mol_type = other RNA
tcaggataacttttaatagaaaagttatcctga

SEQ ID NO: 1143 - RNA, 33 nt, synthetic construct
  source 1..33: mol_type = other RNA
tacaacttccaaatacacaatttggaagttgta

SEQ ID NO: 1144 - RNA, 33 nt, synthetic construct
  source 1..33: mol_type = other RNA
aatcattctctaataaaagattagagaatgatt

SEQ ID NO: 1145 - RNA, 33 nt, synthetic construct
  source 1..33: mol_type = other RNA
gaatagctttcccttttgaagggaaagctattc

SEQ ID NO: 1146 - RNA, 33 nt, synthetic construct
  source 1..33: mol_type = other RNA
ggaaattcttgtctgtcatagacaagaatttcc

SEQ ID NO: 1147 - RNA, 33 nt, synthetic construct
  source 1..33: mol_type = other RNA
ttgaattttggttctgctcgaaccaaaattcaa

SEQ ID NO: 1148 - RNA, 33 nt, synthetic construct
  source 1..33: mol_type = other RNA
agtgagctttacaaataagttgtaaagctcact

SEQ ID NO: 1149 - RNA, 33 nt, synthetic construct
  source 1..33: mol_type = other RNA
aaacatggtacactgtttaagtgtaccatgttt

SEQ ID NO: 1150 - RNA, 33 nt, synthetic construct
  source 1..33: mol_type = other RNA
tagactctatgactgttacagtcatagagtcta

SEQ ID NO: 1151 - RNA, 33 nt, synthetic construct
  source 1..33: mol_type = other RNA
ttttcttgggagtcatctggactcccaagaaaa

SEQ ID NO: 1152 - RNA, 33 nt, synthetic construct
  source 1..33: mol_type = other RNA
gtaggcaaggagatgtccaatctccttgcctac

SEQ ID NO: 1153 - RNA, 33 nt, synthetic construct
  source 1..33: mol_type = other RNA
aaagccacctccatacctcatggaggtggcttt

SEQ ID NO: 1154 - RNA, 33 nt, synthetic construct
  source 1..33: mol_type = other RNA
taagatttcttttccaaacgaaaagaaatctta

SEQ ID NO: 1155 - RNA, 33 nt, synthetic construct
  source 1..33: mol_type = other RNA
aaagctgcaaacttcctcaaagtttgcagcttt

SEQ ID NO: 1156 - RNA, 33 nt, synthetic construct
  source 1..33: mol_type = other RNA
tctaataaaagcaagtgccttgcttttattaga

SEQ ID NO: 1157 - RNA, 33 nt, synthetic construct
  source 1..33: mol_type = other RNA
caattgtttgtgcattcagtgcacaaacaattg

SEQ ID NO: 1158 - RNA, 33 nt, synthetic construct
  source 1..33: mol_type = other RNA
accaaagcttctctcttcaagagaagctttggt

SEQ ID NO: 1159 - RNA, 33 nt, synthetic construct
  source 1..33: mol_type = other RNA
gcaactgttttcttctgggaagaaaacagttgc

SEQ ID NO: 1160 - RNA, 33 nt, synthetic construct
  source 1..33: mol_type = other RNA
atgctttgatacaacttccttgtatcaaagcat

SEQ ID NO: 1161 - RNA, 33 nt, synthetic construct
  source 1..33: mol_type = other RNA
aattcatctaaattagctaaatttagatgaatt

SEQ ID NO: 1162 - RNA, 33 nt, synthetic construct
  source 1..33: mol_type = other RNA
tgtgacgatgtaatagaccattacatcgtcaca

SEQ ID NO: 1163 - RNA, 33 nt, synthetic construct
  source 1..33: mol_type = other RNA
ggtacactgtttatctggtataaacagtgtacc

SEQ ID NO: 1164 - RNA, 33 nt, synthetic construct
  source 1..33: mol_type = other RNA
ggttgccttgtacttgacaagtacaaggcaacc

SEQ ID NO: 1165 - RNA, 33 nt, synthetic construct
  source 1..33: mol_type = other RNA
ccaaggaaattcttgtctgaagaatttccttgg

SEQ ID NO: 1166 - RNA, 33 nt, synthetic construct
  source 1..33: mol_type = other RNA
ttaaccagactgaatcagattcagtctggttaa

SEQ ID NO: 1167 - RNA, 33 nt, synthetic construct
  source 1..33: mol_type = other RNA
tagcagctatttcttctatagaaatagctgcta

SEQ ID NO: 1168 - RNA, 33 nt, synthetic construct
  source 1..33: mol_type = other RNA
ccagttttgtagatatccaatctacaaaactgg

SEQ ID NO: 1169 - RNA, 33 nt, synthetic construct
  source 1..33: mol_type = other RNA
aatgatttcctgtttccagaacaggaaatcatt

SEQ ID NO: 1170 - RNA, 33 nt, synthetic construct
  source 1..33: mol_type = other RNA
agacaagatctcacctacagtgagatcttgtct

SEQ ID NO: 1171 - RNA, 33 nt, synthetic construct
  source 1..33: mol_type = other RNA
gtggattacctttaaccaataaaggtaatccac

SEQ ID NO: 1172 - RNA, 33 nt, synthetic construct
  source 1..33: mol_type = other RNA
tgatactgtgaattttcctaattcacagtatca

SEQ ID NO: 1173 - RNA, 33 nt, synthetic construct
  source 1..33: mol_type = other RNA
aatactgggacaacgctcagttgtcccagtatt

SEQ ID NO: 1174 - RNA, 33 nt, synthetic construct
  source 1..33: mol_type = other RNA
cataattaagtactgtcttagtacttaattatg

SEQ ID NO: 1175 - RNA, 33 nt, synthetic construct
  source 1..33: mol_type = other RNA
caaacttcctcagaggtactctgaggaagtttg

SEQ ID NO: 1176 - RNA, 33 nt, synthetic construct
  source 1..33: mol_type = other RNA
aaggccatgttatttcagaaataacatggcctt

SEQ ID NO: 1177 - RNA, 33 nt, synthetic construct
  source 1..33: mol_type = other RNA
tgcaaactgtatgcagctggcatacagtttgca

SEQ ID NO: 1178 - RNA, 33 nt, synthetic construct
  source 1..33: mol_type = other RNA
agaatagctttcccttttggggaaagctattct

SEQ ID NO: 1179 - RNA, 33 nt, synthetic construct
  source 1..33: mol_type = other RNA
tactgtgaattttccttgagaaaattcacagta

SEQ ID NO: 1180 - RNA, 33 nt, synthetic construct
  source 1..33: mol_type = other RNA
ccaacttcaaagagttcaactctttgaagttgg

SEQ ID NO: 1181 - RNA, 33 nt, synthetic construct
  source 1..33: mol_type = other RNA
ctgaattttgatattggaaatatcaaaattcag

SEQ ID NO: 1182 - RNA, 33 nt, synthetic construct
  source 1..33: mol_type = other RNA
aaaggctgtaagatataagatcttacagccttt

SEQ ID NO: 1183 - RNA, 33 nt, synthetic construct
  source 1..33: mol_type = other RNA
ttgcttttatagtaatttctactataaaagcaa

SEQ ID NO: 1184 - RNA, 33 nt, synthetic construct
  source 1..33: mol_type = other RNA
gtccaagtactcttaaagcaagagtacttggac

SEQ ID NO: 1185 - RNA, 33 nt, synthetic construct
  source 1..33: mol_type = other RNA
acactaattctgctgtctgagcagaattagtgt

SEQ ID NO: 1186 - RNA, 33 nt, synthetic construct
  source 1..33: mol_type = other RNA
ctggcttgcttactggtaaagtaagcaagccag

SEQ ID NO: 1187 - RNA, 33 nt, synthetic construct
  source 1..33: mol_type = other RNA
gttgccttgtacttgacaaaagtacaaggcaac

SEQ ID NO: 1188 - RNA, 33 nt, synthetic construct
  source 1..33: mol_type = other RNA
cagcatttctgtaggacatctacagaaatgctg

SEQ ID NO: 1189 - RNA, 33 nt, synthetic construct
  source 1..33: mol_type = other RNA
ttatactttgataagatgcttatcaaagtataa

SEQ ID NO: 1190 - RNA, 33 nt, synthetic construct
  source 1..33: mol_type = other RNA
ttaagtactgtcttcctttaagacagtacttaa

SEQ ID NO: 1191 - RNA, 33 nt, synthetic construct
  source 1..33: mol_type = other RNA
ctgcaaacttcctcagagggaggaagtttgcag

SEQ ID NO: 1192 - RNA, 33 nt, synthetic construct
  source 1..33: mol_type = other RNA
aagacagtttctcttttggagagaaactgtctt

SEQ ID NO: 1193 - RNA, 33 nt, synthetic construct
  source 1..33: mol_type = other RNA
attcagtttgtagggagagcctacaaactgaat

SEQ ID NO: 1194 - RNA, 33 nt, synthetic construct
  source 1..33: mol_type = other RNA
tggaatgtttatactttgagtataaacattcca

SEQ ID NO: 1195 - RNA, 33 nt, synthetic construct
  source 1..33: mol_type = other RNA
taacagggtcttcatgtgttgaagaccctgtta

SEQ ID NO: 1196 - RNA, 33 nt, synthetic construct
  source 1..33: mol_type = other RNA
agagattgttgcatcaaatatgcaacaatctct

SEQ ID NO: 1197 - RNA, 33 nt, synthetic construct
  source 1..33: mol_type = other RNA
gagtcatctgcatttgcataatgcagatgactc

SEQ ID NO: 1198 - RNA, 33 nt, synthetic construct
  source 1..33: mol_type = other RNA
gaatgtttatatttagcagaaatataaacattc

SEQ ID NO: 1199 - RNA, 33 nt, synthetic construct
  source 1..33: mol_type = other RNA
ggaacaagatgaacttcccgttcatcttgttcc

SEQ ID NO: 1200 - RNA, 33 nt, synthetic construct
  source 1..33: mol_type = other RNA
ggtatttctgcctcttcaggaggcagaaatacc

SEQ ID NO: 1201 - RNA, 33 nt, synthetic construct
  source 1..33: mol_type = other RNA
cagaactgcatcccagaaggggatgcagttctg

SEQ ID NO: 1202 - RNA, 33 nt, synthetic construct
  source 1..33: mol_type = other RNA
ttccggtgtccaataacctattggacaccggaa

SEQ ID NO: 1203 - RNA, 33 nt, synthetic construct
  source 1..33: mol_type = other RNA
catcaattgtttgtgcattacaaacaattgatg

SEQ ID NO: 1204 - RNA, 33 nt, synthetic construct
  source 1..33: mol_type = other RNA
aatactctttccaagggctttggaaagagtatt

SEQ ID NO: 1205 - RNA, 33 nt, synthetic construct
  source 1..33: mol_type = other RNA
tcaaatgcttcagtgtatcactgaagcatttga

SEQ ID NO: 1206 - RNA, 33 nt, synthetic construct
  source 1..33: mol_type = other RNA
aagcaagtgccactaattcagtggcacttgctt

SEQ ID NO: 1207 - RNA, 33 nt, synthetic construct
  source 1..33: mol_type = other RNA
ttaatagagattgttgcatacaatctctattaa

SEQ ID NO: 1208 - RNA, 33 nt, synthetic construct
  source 1..33: mol_type = other RNA
atagagattgttgcatcaagcaacaatctctat

SEQ ID NO: 1209 - RNA, 33 nt, synthetic construct
  source 1..33: mol_type = other RNA
gaactcctttcgtctgctagacgaaaggagttc

SEQ ID NO: 1210 - RNA, 33 nt, synthetic construct
  source 1..33: mol_type = other RNA
gtcattttataattatgtaaattataaaatgac

SEQ ID NO: 1211 - RNA, 33 nt, synthetic construct
  source 1..33: mol_type = other RNA
aagaattgaaatactctttgtatttcaattctt

SEQ ID NO: 1212 - RNA, 33 nt, synthetic construct
  source 1..33: mol_type = other RNA
aaagcctttctaattccaaattagaaaggcttt

SEQ ID NO: 1213 - RNA, 33 nt, synthetic construct
  source 1..33: mol_type = other RNA
tcaatatttaaccagactgtggttaaatattga

SEQ ID NO: 1214 - RNA, 33 nt, synthetic construct
  source 1..33: mol_type = other RNA
tggtatattcatttccaggaaatgaatatacca

SEQ ID NO: 1215 - RNA, 33 nt, synthetic construct
  source 1..33: mol_type = other RNA
tgaaacaattgaacgaaacgttcaattgtttca

SEQ ID NO: 1216 - RNA, 33 nt, synthetic construct
  source 1..33: mol_type = other RNA
aatatcttgcttttatagtaaaagcaagatatt

SEQ ID NO: 1217 - RNA, 33 nt, synthetic construct
  source 1..33: mol_type = other RNA
agagattgtcagatccaatatctgacaatctct

SEQ ID NO: 1218 - RNA, 33 nt, synthetic construct
  source 1..33: mol_type = other RNA
agcaattccatttatcaactaaatggaattgct

SEQ ID NO: 1219 - RNA, 33 nt, synthetic construct
  source 1..33: mol_type = other RNA
ttatcaggataacttttaaagttatcctgataa

SEQ ID NO: 1220 - RNA, 33 nt, synthetic construct
  source 1..33: mol_type = other RNA
cgaatttctggcttgcttaaagccagaaattcg

SEQ ID NO: 1221 - RNA, 33 nt, synthetic construct
  source 1..33: mol_type = other RNA
tcaagttcagactggtgagcagtctgaacttga

SEQ ID NO: 1222 - RNA, 33 nt, synthetic construct
  source 1..33: mol_type = other RNA
agaggtactggttttgtgaaaaccagtacctct

SEQ ID NO: 1223 - RNA, 33 nt, synthetic construct
  source 1..33: mol_type = other RNA
ggtattttctttcaagcaatgaaagaaaatacc

SEQ ID NO: 1224 - RNA, 33 nt, synthetic construct
  source 1..33: mol_type = other RNA
aggtactggttttgtgaaccaaaaccagtacct

SEQ ID NO: 1225 - RNA, 33 nt, synthetic construct
  source 1..33: mol_type = other RNA
cagattccctccacagcaggtggagggaatctg

SEQ ID NO: 1226 - RNA, 33 nt, synthetic construct
  source 1..33: mol_type = other RNA
tagtcagcatttctgtaggagaaatgctgacta

SEQ ID NO: 1227 - RNA, 33 nt, synthetic construct
  source 1..33: mol_type = other RNA
attagcacggagctggcttagctccgtgctaat

SEQ ID NO: 1228 - RNA, 33 nt, synthetic construct
  source 1..33: mol_type = other RNA
taagagacacagtttggccaactgtgtctctta

SEQ ID NO: 1229 - RNA, 33 nt, synthetic construct
  source 1..33: mol_type = other RNA
gaacatgttgtgtctctaggacacaacatgttc

SEQ ID NO: 1230 - RNA, 33 nt, synthetic construct
  source 1..33: mol_type = other RNA
cataagtgcaaactgtatgagtttgcacttatg

SEQ ID NO: 1231 - RNA, 33 nt, synthetic construct
  source 1..33: mol_type = other RNA
caaattcagtttgtagggaacaaactgaatttg

SEQ ID NO: 1232 - RNA, 33 nt, synthetic construct
  source 1..33: mol_type = other RNA
acaagcagtccttttacacaaaggactgcttgt

SEQ ID NO: 1233 - RNA, 33 nt, synthetic construct
  source 1..33: mol_type = other RNA
aagtattcccaaaaggcccttttgggaatactt

SEQ ID NO: 1234 - RNA, 33 nt, synthetic construct
  source 1..33: mol_type = other RNA
caatcacagtaaaggctgtctttactgtgattg

SEQ ID NO: 1235 - RNA, 33 nt, synthetic construct
  source 1..33: mol_type = other RNA
aatagctttcccttttgacaagggaaagctatt

SEQ ID NO: 1236 - RNA, 33 nt, synthetic construct
  source 1..33: mol_type = other RNA
tattggttgatactgtgaaagtatcaaccaata

SEQ ID NO: 1237 - RNA, 33 nt, synthetic construct
  source 1..33: mol_type = other RNA
cagaaatggccaatgtaaaattggccatttctg

SEQ ID NO: 1238 - RNA, 33 nt, synthetic construct
  source 1..33: mol_type = other RNA
ttgtaatcagagtttccgtaactctgattacaa

SEQ ID NO: 1239 - RNA, 33 nt, synthetic construct
  source 1..33: mol_type = other RNA
actcaggctttaatgatcaattaaagcctgagt

SEQ ID NO: 1240 - RNA, 33 nt, synthetic construct
  source 1..33: mol_type = other RNA
cagctatttcttctatcttagaagaaatagctg

SEQ ID NO: 1241 - RNA, 33 nt, synthetic construct
  source 1..33: mol_type = other RNA
atatcttgcttttatagtataaaagcaagatat

SEQ ID NO: 1242 - RNA, 33 nt, synthetic construct
  source 1..33: mol_type = other RNA
acaaggttcatcattttctatgatgaaccttgt

SEQ ID NO: 1243 - RNA, 33 nt, synthetic construct
  source 1..33: mol_type = other RNA
attgtgttttgcattgctgatgcaaaacacaat

SEQ ID NO: 1244 - RNA, 33 nt, synthetic construct
  source 1..33: mol_type = other RNA
gccacaataaagaattacattctttattgtggc

SEQ ID NO: 1245 - RNA, 33 nt, synthetic construct
  source 1..33: mol_type = other RNA
ggtggattacctttaaccaaaaggtaatccacc

SEQ ID NO: 1246 - RNA, 33 nt, synthetic construct
  source 1..33: mol_type = other RNA
cttctctcttcaaagctgatttgaagagagaag

SEQ ID NO: 1247 - RNA, 33 nt, synthetic construct
  source 1..33: mol_type = other RNA
tgggatgcttcaatatcctattgaagcatccca

SEQ ID NO: 1248 - RNA, 33 nt, synthetic construct
  source 1..33: mol_type = other RNA
aaatcttctaaactgtagtagtttagaagattt

SEQ ID NO: 1249 - RNA, 33 nt, synthetic construct
  source 1..33: mol_type = other RNA
aaattcagtttgtagggagtacaaactgaattt

SEQ ID NO: 1250 - RNA, 33 nt, synthetic construct
  source 1..33: mol_type = other RNA
ctgtcattttataattatgttataaaatgacag

SEQ ID NO: 1251 - RNA, 33 nt, synthetic construct
  source 1..33: mol_type = other RNA
aatgctttgatacaacttctgtatcaaagcatt

SEQ ID NO: 1252 - RNA, 33 nt, synthetic construct
  source 1..33: mol_type = other RNA
tcctctttatatttagcctaaatataaagagga

SEQ ID NO: 1253 - RNA, 33 nt, synthetic construct
  source 1..33: mol_type = other RNA
gcaaattcatctaaattagttagatgaatttgc

SEQ ID NO: 1254 - RNA, 33 nt, synthetic construct
  source 1..33: mol_type = other RNA
ttccaaatacacataagaaatgtgtatttggaa

SEQ ID NO: 1255 - RNA, 33 nt, synthetic construct; identical to SEQ ID NO: 1005
  source 1..33: mol_type = other RNA

SEQ ID NO: 1256 - RNA, 33 nt, synthetic construct; identical to SEQ ID NO: 1006
  source 1..33: mol_type = other RNA

SEQ ID NO: 1257 - RNA, 33 nt, synthetic construct; identical to SEQ ID NO: 1007
  source 1..33: mol_type = other RNA

SEQ ID NO: 1258 - RNA, 33 nt, synthetic construct; identical to SEQ ID NO: 1008
  source 1..33: mol_type = other RNA

SEQ ID NO: 1259 - RNA, 33 nt, synthetic construct; identical to SEQ ID NO: 1009
  source 1..33: mol_type = other RNA

SEQ ID NO: 1260 - RNA, 33 nt, synthetic construct; identical to SEQ ID NO: 1010
  source 1..33: mol_type = other RNA

SEQ ID NO: 1261 - RNA, 33 nt, synthetic construct; identical to SEQ ID NO: 1011
  source 1..33: mol_type = other RNA

SEQ ID NO: 1262 - RNA, 33 nt, synthetic construct; identical to SEQ ID NO: 1012
  source 1..33: mol_type = other RNA

SEQ ID NO: 1263 - RNA, 33 nt, synthetic construct; identical to SEQ ID NO: 1013
  source 1..33: mol_type = other RNA

SEQ ID NO: 1264 - RNA, 33 nt, synthetic construct; identical to SEQ ID NO: 1014
  source 1..33: mol_type = other RNA

SEQ ID NO: 1265 - RNA, 33 nt, synthetic construct; identical to SEQ ID NO: 1015
  source 1..33: mol_type = other RNA

SEQ ID NO: 1266 - RNA, 33 nt, synthetic construct; identical to SEQ ID NO: 1016
  source 1..33: mol_type = other RNA

SEQ ID NO: 1267 - RNA, 33 nt, synthetic construct; identical to SEQ ID NO: 1017
  source 1..33: mol_type = other RNA

SEQ ID NO: 1268 - RNA, 33 nt, synthetic construct; identical to SEQ ID NO: 1018
  source 1..33: mol_type = other RNA

SEQ ID NO: 1269 - RNA, 33 nt, synthetic construct; identical to SEQ ID NO: 1019
  source 1..33: mol_type = other RNA

SEQ ID NO: 1270 - RNA, 33 nt, synthetic construct; identical to SEQ ID NO: 1020
  source 1..33: mol_type = other RNA

SEQ ID NO: 1271 - RNA, 33 nt, synthetic construct; identical to SEQ ID NO: 1021
  source 1..33: mol_type = other RNA

SEQ ID NO: 1272 - RNA, 33 nt, synthetic construct; identical to SEQ ID NO: 1022
  source 1..33: mol_type = other RNA

SEQ ID NO: 1273 - RNA, 33 nt, synthetic construct; identical to SEQ ID NO: 1023
  source 1..33: mol_type = other RNA

SEQ ID NO: 1274 - RNA, 33 nt, synthetic construct; identical to SEQ ID NO: 1024
  source 1..33: mol_type = other RNA

SEQ ID NO: 1275 - RNA, 33 nt, synthetic construct; identical to SEQ ID NO: 1025
  source 1..33: mol_type = other RNA

SEQ ID NO: 1276 - RNA, 33 nt, synthetic construct; identical to SEQ ID NO: 1026
  source 1..33: mol_type = other RNA

SEQ ID NO: 1277 - RNA, 33 nt, synthetic construct; identical to SEQ ID NO: 1027
  source 1..33: mol_type = other RNA

SEQ ID NO: 1278 - RNA, 33 nt, synthetic construct; identical to SEQ ID NO: 1028
  source 1..33: mol_type = other RNA

SEQ ID NO: 1279 - RNA, 33 nt, synthetic construct; identical to SEQ ID NO: 1029
  source 1..33: mol_type = other RNA

SEQ ID NO: 1280 - RNA, 33 nt, synthetic construct; identical to SEQ ID NO: 1030
  source 1..33: mol_type = other RNA

SEQ ID NO: 1281 - RNA, 33 nt, synthetic construct; identical to SEQ ID NO: 1031
  source 1..33: mol_type = other RNA

SEQ ID NO: 1282 - RNA, 33 nt, synthetic construct; identical to SEQ ID NO: 1032
  source 1..33: mol_type = other RNA

SEQ ID NO: 1283 - RNA, 33 nt, synthetic construct; identical to SEQ ID NO: 1033
  source 1..33: mol_type = other RNA

SEQ ID NO: 1284 - RNA, 33 nt, synthetic construct; identical to SEQ ID NO: 1034
  source 1..33: mol_type = other RNA

SEQ ID NO: 1285 - RNA, 33 nt, synthetic construct; identical to SEQ ID NO: 1035
  source 1..33: mol_type = other RNA

SEQ ID NO: 1286 - RNA, 33 nt, synthetic construct; identical to SEQ ID NO: 1036
  source 1..33: mol_type = other RNA

SEQ ID NO: 1287 - RNA, 33 nt, synthetic construct; identical to SEQ ID NO: 1037
  source 1..33: mol_type = other RNA

SEQ ID NO: 1288 - RNA, 33 nt, synthetic construct; identical to SEQ ID NO: 1038
  source 1..33: mol_type = other RNA

SEQ ID NO: 1289 - RNA, 33 nt, synthetic construct; identical to SEQ ID NO: 1039
  source 1..33: mol_type = other RNA

SEQ ID NO: 1290 - RNA, 33 nt, synthetic construct; identical to SEQ ID NO: 1040
  source 1..33: mol_type = other RNA

SEQ ID NO: 1291 - RNA, 33 nt, synthetic construct; identical to SEQ ID NO: 1041
  source 1..33: mol_type = other RNA

SEQ ID NO: 1292 - RNA, 33 nt, synthetic construct; identical to SEQ ID NO: 1042
  source 1..33: mol_type = other RNA

SEQ ID NO: 1293 - RNA, 33 nt, synthetic construct; identical to SEQ ID NO: 1043
  source 1..33: mol_type = other RNA

SEQ ID NO: 1294 - RNA, 33 nt, synthetic construct; identical to SEQ ID NO: 1044
  source 1..33: mol_type = other RNA

SEQ ID NO: 1295 - RNA, 33 nt, synthetic construct; identical to SEQ ID NO: 1045
  source 1..33: mol_type = other RNA

SEQ ID NO: 1296 - RNA, 33 nt, synthetic construct; identical to SEQ ID NO: 1046
  source 1..33: mol_type = other RNA

SEQ ID NO: 1297 - RNA, 33 nt, synthetic construct; identical to SEQ ID NO: 1047
  source 1..33: mol_type = other RNA

SEQ ID NO: 1298 - RNA, 33 nt, synthetic construct; identical to SEQ ID NO: 1048
  source 1..33: mol_type = other RNA

SEQ ID NO: 1299 - RNA, 33 nt, synthetic construct; identical to SEQ ID NO: 1049
  source 1..33: mol_type = other RNA

SEQ ID NO: 1300 - RNA, 33 nt, synthetic construct; identical to SEQ ID NO: 1050
  source 1..33: mol_type = other RNA

SEQ ID NO: 1301 - RNA, 33 nt, synthetic construct; identical to SEQ ID NO: 1051
  source 1..33: mol_type = other RNA

SEQ ID NO: 1302 - RNA, 33 nt, synthetic construct; identical to SEQ ID NO: 1052
  source 1..33: mol_type = other RNA

SEQ ID NO: 1303 - RNA, 33 nt, synthetic construct; identical to SEQ ID NO: 1053
  source 1..33: mol_type = other RNA

SEQ ID NO: 1304 - RNA, 33 nt, synthetic construct; identical to SEQ ID NO: 1054
  source 1..33: mol_type = other RNA

SEQ ID NO: 1305 - RNA, 33 nt, synthetic construct; identical to SEQ ID NO: 1055
  source 1..33: mol_type = other RNA

SEQ ID NO: 1306 - RNA, 33 nt, synthetic construct; identical to SEQ ID NO: 1056
  source 1..33: mol_type = other RNA

SEQ ID NO: 1307 - RNA, 33 nt, synthetic construct; identical to SEQ ID NO: 1057
  source 1..33: mol_type = other RNA

SEQ ID NO: 1308 - RNA, 33 nt, synthetic construct; identical to SEQ ID NO: 1058
  source 1..33: mol_type = other RNA

SEQ ID NO: 1309 - RNA, 33 nt, synthetic construct; identical to SEQ ID NO: 1059
  source 1..33: mol_type = other RNA

SEQ ID NO: 1310 - RNA, 33 nt, synthetic construct; identical to SEQ ID NO: 1060
  source 1..33: mol_type = other RNA

SEQ ID NO: 1311 - RNA, 33 nt, synthetic construct; identical to SEQ ID NO: 1061
  source 1..33: mol_type = other RNA

SEQ ID NO: 1312 - RNA, 33 nt, synthetic construct; identical to SEQ ID NO: 1062
  source 1..33: mol_type = other RNA

SEQ ID NO: 1313 - RNA, 33 nt, synthetic construct; identical to SEQ ID NO: 1063
  source 1..33: mol_type = other RNA

SEQ ID NO: 1314 - RNA, 33 nt, synthetic construct; identical to SEQ ID NO: 1064
  source 1..33: mol_type = other RNA

SEQ ID NO: 1315 - RNA, 33 nt, synthetic construct; identical to SEQ ID NO: 1065
  source 1..33: mol_type = other RNA

SEQ ID NO: 1316 - RNA, 33 nt, synthetic construct; identical to SEQ ID NO: 1066
  source 1..33: mol_type = other RNA

SEQ ID NO: 1317 - RNA, 33 nt, synthetic construct; identical to SEQ ID NO: 1067
  source 1..33: mol_type = other RNA

SEQ ID NO: 1318 - RNA, 33 nt, synthetic construct; identical to SEQ ID NO: 1068
  source 1..33: mol_type = other RNA

SEQ ID NO: 1319 - RNA, 33 nt, synthetic construct; identical to SEQ ID NO: 1069
  source 1..33: mol_type = other RNA

SEQ ID NO: 1320 - RNA, 33 nt, synthetic construct; identical to SEQ ID NO: 1070
  source 1..33: mol_type = other RNA

SEQ ID NO: 1321 - RNA, 33 nt, synthetic construct; identical to SEQ ID NO: 1071
  source 1..33: mol_type = other RNA

SEQ ID NO: 1322 - RNA, 33 nt, synthetic construct; identical to SEQ ID NO: 1072
  source 1..33: mol_type = other RNA

SEQ ID NO: 1323 - RNA, 33 nt, synthetic construct; identical to SEQ ID NO: 1073
  source 1..33: mol_type = other RNA

SEQ ID NO: 1324 - RNA, 33 nt, synthetic construct; identical to SEQ ID NO: 1074
  source 1..33: mol_type = other RNA

SEQ ID NO: 1325 - RNA, 33 nt, synthetic construct; identical to SEQ ID NO: 1075
  source 1..33: mol_type = other RNA

SEQ ID NO: 1326 - RNA, 33 nt, synthetic construct; identical to SEQ ID NO: 1076
  source 1..33: mol_type = other RNA

SEQ ID NO: 1327 - RNA, 33 nt, synthetic construct; identical to SEQ ID NO: 1077
  source 1..33: mol_type = other RNA

SEQ ID NO: 1328 - RNA, 33 nt, synthetic construct; identical to SEQ ID NO: 1078
  source 1..33: mol_type = other RNA

SEQ ID NO: 1329 - RNA, 33 nt, synthetic construct; identical to SEQ ID NO: 1079
  source 1..33: mol_type = other RNA

SEQ ID NO: 1330 - RNA, 33 nt, synthetic construct; identical to SEQ ID NO: 1080
  source 1..33: mol_type = other RNA

SEQ ID NO: 1331 - RNA, 33 nt, synthetic construct; identical to SEQ ID NO: 1081
  source 1..33: mol_type = other RNA

SEQ ID NO: 1332 - RNA, 33 nt, synthetic construct; identical to SEQ ID NO: 1082
  source 1..33: mol_type = other RNA

SEQ ID NO: 1333 - RNA, 33 nt, synthetic construct; identical to SEQ ID NO: 1083
  source 1..33: mol_type = other RNA

SEQ ID NO: 1334 - RNA, 33 nt, synthetic construct; identical to SEQ ID NO: 1084
  source 1..33: mol_type = other RNA

SEQ ID NO: 1335 - RNA, 33 nt, synthetic construct; identical to SEQ ID NO: 1085
  source 1..33: mol_type = other RNA

SEQ ID NO: 1336 - RNA, 33 nt, synthetic construct; identical to SEQ ID NO: 1086
  source 1..33: mol_type = other RNA

SEQ ID NO: 1337 - RNA, 33 nt, synthetic construct; identical to SEQ ID NO: 1087
  source 1..33: mol_type = other RNA

SEQ ID NO: 1338 - RNA, 33 nt, synthetic construct; identical to SEQ ID NO: 1088
  source 1..33: mol_type = other RNA

SEQ ID NO: 1339 - RNA, 33 nt, synthetic construct; identical to SEQ ID NO: 1089
  source 1..33: mol_type = other RNA

SEQ ID NO: 1340 - RNA, 33 nt, synthetic construct; identical to SEQ ID NO: 1090
  source 1..33: mol_type = other RNA

SEQ ID NO: 1341 - RNA, 33 nt, synthetic construct; identical to SEQ ID NO: 1091
  source 1..33: mol_type = other RNA

SEQ ID NO: 1342 - RNA, 33 nt, synthetic construct; identical to SEQ ID NO: 1092
  source 1..33: mol_type = other RNA

SEQ ID NO: 1343 - RNA, 33 nt, synthetic construct; identical to SEQ ID NO: 1093
  source 1..33: mol_type = other RNA

SEQ ID NO: 1344 - RNA, 33 nt, synthetic construct; identical to SEQ ID NO: 1094
  source 1..33: mol_type = other RNA

SEQ ID NO: 1345 - RNA, 33 nt, synthetic construct; identical to SEQ ID NO: 1095
  source 1..33: mol_type = other RNA

SEQ ID NO: 1346 - RNA, 33 nt, synthetic construct; identical to SEQ ID NO: 1096
  source 1..33: mol_type = other RNA

SEQ ID NO: 1347 - RNA, 33 nt, synthetic construct; identical to SEQ ID NO: 1097
  source 1..33: mol_type = other RNA

SEQ ID NO: 1348 - RNA, 33 nt, synthetic construct; identical to SEQ ID NO: 1098
  source 1..33: mol_type = other RNA

SEQ ID NO: 1349 - RNA, 33 nt, synthetic construct; identical to SEQ ID NO: 1099
  source 1..33: mol_type = other RNA

SEQ ID NO: 1350 - RNA, 33 nt, synthetic construct; identical to SEQ ID NO: 1100
  source 1..33: mol_type = other RNA

SEQ ID NO: 1351 - RNA, 33 nt, synthetic construct; identical to SEQ ID NO: 1101
  source 1..33: mol_type = other RNA

SEQ ID NO: 1352 - RNA, 33 nt, synthetic construct; identical to SEQ ID NO: 1102
  source 1..33: mol_type = other RNA

SEQ ID NO: 1353 - RNA, 33 nt, synthetic construct; identical to SEQ ID NO: 1103
  source 1..33: mol_type = other RNA

SEQ ID NO: 1354 - RNA, 33 nt, synthetic construct; identical to SEQ ID NO: 1104
  source 1..33: mol_type = other RNA

SEQ ID NO: 1355 - RNA, 33 nt, synthetic construct; identical to SEQ ID NO: 1105
  source 1..33: mol_type = other RNA

SEQ ID NO: 1356 - RNA, 33 nt, synthetic construct; identical to SEQ ID NO: 1106
  source 1..33: mol_type = other RNA

SEQ ID NO: 1357 - RNA, 33 nt, synthetic construct; identical to SEQ ID NO: 1107
  source 1..33: mol_type = other RNA

SEQ ID NO: 1358 - RNA, 33 nt, synthetic construct; identical to SEQ ID NO: 1108
  source 1..33: mol_type = other RNA

SEQ ID NO: 1359 - RNA, 33 nt, synthetic construct; identical to SEQ ID NO: 1109
  source 1..33: mol_type = other RNA

SEQ ID NO: 1360 - RNA, 33 nt, synthetic construct; identical to SEQ ID NO: 1110
  source 1..33: mol_type = other RNA

SEQ ID NO: 1361 - RNA, 33 nt, synthetic construct; identical to SEQ ID NO: 1111
  source 1..33: mol_type = other RNA

SEQ ID NO: 1362 - RNA, 33 nt, synthetic construct; identical to SEQ ID NO: 1112
  source 1..33: mol_type = other RNA

SEQ ID NO: 1363 - RNA, 33 nt, synthetic construct; identical to SEQ ID NO: 1113
  source 1..33: mol_type = other RNA

SEQ ID NO: 1364 - RNA, 33 nt, synthetic construct; identical to SEQ ID NO: 1114
  source 1..33: mol_type = other RNA

SEQ ID NO: 1365 - RNA, 33 nt, synthetic construct; identical to SEQ ID NO: 1115
  source 1..33: mol_type = other RNA

SEQ ID NO: 1366 - RNA, 33 nt, synthetic construct; identical to SEQ ID NO: 1116
  source 1..33: mol_type = other RNA

SEQ ID NO: 1367 - RNA, 33 nt, synthetic construct; identical to SEQ ID NO: 1117
  source 1..33: mol_type = other RNA

SEQ ID NO: 1368 - RNA, 33 nt, synthetic construct; identical to SEQ ID NO: 1118
  source 1..33: mol_type = other RNA

SEQ ID NO: 1369 - RNA, 33 nt, synthetic construct; identical to SEQ ID NO: 1119
  source 1..33: mol_type = other RNA

SEQ ID NO: 1370 - RNA, 33 nt, synthetic construct; identical to SEQ ID NO: 1120
  source 1..33: mol_type = other RNA

SEQ ID NO: 1371 - RNA, 33 nt, synthetic construct; identical to SEQ ID NO: 1121
  source 1..33: mol_type = other RNA

SEQ ID NO: 1372 - RNA, 33 nt, synthetic construct; identical to SEQ ID NO: 1122
  source 1..33: mol_type = other RNA

SEQ ID NO: 1373 - RNA, 33 nt, synthetic construct; identical to SEQ ID NO: 1123
  source 1..33: mol_type = other RNA

SEQ ID NO: 1374 - RNA, 33 nt, synthetic construct; identical to SEQ ID NO: 1124
  source 1..33: mol_type = other RNA

SEQ ID NO: 1375 - RNA, 33 nt, synthetic construct; identical to SEQ ID NO: 1125
  source 1..33: mol_type = other RNA

SEQ ID NO: 1376 - RNA, 33 nt, synthetic construct; identical to SEQ ID NO: 1126
  source 1..33: mol_type = other RNA

SEQ ID NO: 1377 - RNA, 33 nt, synthetic construct; identical to SEQ ID NO: 1127
  source 1..33: mol_type = other RNA

SEQ ID NO: 1378 - RNA, 33 nt, synthetic construct; identical to SEQ ID NO: 1128
  source 1..33: mol_type = other RNA

SEQ ID NO: 1379 - RNA, 33 nt, synthetic construct; identical to SEQ ID NO: 1129
  source 1..33: mol_type = other RNA

SEQ ID NO: 1380 - RNA, 33 nt, synthetic construct; identical to SEQ ID NO: 1130
  source 1..33: mol_type = other RNA

SEQ ID NO: 1381 - RNA, 33 nt, synthetic construct; identical to SEQ ID NO: 1131
  source 1..33: mol_type = other RNA

SEQ ID NO: 1382 - RNA, 33 nt, synthetic construct; identical to SEQ ID NO: 1132
  source 1..33: mol_type = other RNA

SEQ ID NO: 1383 - RNA, 33 nt, synthetic construct; identical to SEQ ID NO: 1133
  source 1..33: mol_type = other RNA

SEQ ID NO: 1384 - RNA, 33 nt, synthetic construct; identical to SEQ ID NO: 1134
  source 1..33: mol_type = other RNA

SEQ ID NO: 1385 - RNA, 33 nt, synthetic construct; identical to SEQ ID NO: 1135
  source 1..33: mol_type = other RNA

SEQ ID NO: 1386 - RNA, 33 nt, synthetic construct; identical to SEQ ID NO: 1136
  source 1..33: mol_type = other RNA

SEQ ID NO: 1387 - RNA, 33 nt, synthetic construct; identical to SEQ ID NO: 1137
  source 1..33: mol_type = other RNA

SEQ ID NO: 1388 - RNA, 33 nt, synthetic construct; identical to SEQ ID NO: 1138
  source 1..33: mol_type = other RNA

SEQ ID NO: 1389 - RNA, 33 nt, synthetic construct; identical to SEQ ID NO: 1139
  source 1..33: mol_type = other RNA

SEQ ID NO: 1390 - RNA, 33 nt, synthetic construct; identical to SEQ ID NO: 1140
  source 1..33: mol_type = other RNA

SEQ ID NO: 1391 - RNA, 33 nt, synthetic construct; identical to SEQ ID NO: 1141
  source 1..33: mol_type = other RNA

SEQ ID NO: 1392 - RNA, 33 nt, synthetic construct; identical to SEQ ID NO: 1142
  source 1..33: mol_type = other RNA

SEQ ID NO: 1393 - RNA, 33 nt, synthetic construct; identical to SEQ ID NO: 1143
  source 1..33: mol_type = other RNA

SEQ ID NO: 1394 - RNA, 33 nt, synthetic construct; identical to SEQ ID NO: 1144
  source 1..33: mol_type = other RNA

SEQ ID NO: 1395 - RNA, 33 nt, synthetic construct; identical to SEQ ID NO: 1145
  source 1..33: mol_type = other RNA

SEQ ID NO: 1396 - RNA, 33 nt, synthetic construct; identical to SEQ ID NO: 1146
  source 1..33: mol_type = other RNA

SEQ ID NO: 1397 - RNA, 33 nt, synthetic construct; identical to SEQ ID NO: 1147
  source 1..33: mol_type = other RNA

SEQ ID NO: 1398 - RNA, 33 nt, synthetic construct; identical to SEQ ID NO: 1148
  source 1..33: mol_type = other RNA

SEQ ID NO: 1399 - RNA, 33 nt, synthetic construct; identical to SEQ ID NO: 1149
  source 1..33: mol_type = other RNA

SEQ ID NO: 1400 - RNA, 33 nt, synthetic construct; identical to SEQ ID NO: 1150
  source 1..33: mol_type = other RNA

SEQ ID NO: 1401 - RNA, 33 nt, synthetic construct; identical to SEQ ID NO: 1151
  source 1..33: mol_type = other RNA

SEQ ID NO: 1402 - RNA, 33 nt, synthetic construct; identical to SEQ ID NO: 1152
  source 1..33: mol_type = other RNA

SEQ ID NO: 1403 - RNA, 33 nt, synthetic construct; identical to SEQ ID NO: 1153
  source 1..33: mol_type = other RNA

SEQ ID NO: 1404 - RNA, 33 nt, synthetic construct; identical to SEQ ID NO: 1154
  source 1..33: mol_type = other RNA

SEQ ID NO: 1405 - RNA, 33 nt, synthetic construct; identical to SEQ ID NO: 1155
  source 1..33: mol_type = other RNA

SEQ ID NO: 1406 - RNA, 33 nt, synthetic construct; identical to SEQ ID NO: 1156
  source 1..33: mol_type = other RNA

SEQ ID NO: 1407 - RNA, 33 nt, synthetic construct; identical to SEQ ID NO: 1157
  source 1..33: mol_type = other RNA

SEQ ID NO: 1408 - RNA, 33 nt, synthetic construct; identical to SEQ ID NO: 1158
  source 1..33: mol_type = other RNA

SEQ ID NO: 1409 - RNA, 33 nt, synthetic construct; identical to SEQ ID NO: 1159
  source 1..33: mol_type = other RNA

SEQ ID NO: 1410 - RNA, 33 nt, synthetic construct; identical to SEQ ID NO: 1160
  source 1..33: mol_type = other RNA

SEQ ID NO: 1411 - RNA, 33 nt, synthetic construct; identical to SEQ ID NO: 1161
  source 1..33: mol_type = other RNA

SEQ ID NO: 1412 - RNA, 33 nt, synthetic construct; identical to SEQ ID NO: 1162
  source 1..33: mol_type = other RNA

SEQ ID NO: 1413 - RNA, 33 nt, synthetic construct; identical to SEQ ID NO: 1163
  source 1..33: mol_type = other RNA

SEQ ID NO: 1414 - RNA, 33 nt, synthetic construct; identical to SEQ ID NO: 1164
  source 1..33: mol_type = other RNA

SEQ ID NO: 1415 - RNA, 33 nt, synthetic construct; identical to SEQ ID NO: 1165
  source 1..33: mol_type = other RNA

SEQ ID NO: 1416 - RNA, 33 nt, synthetic construct; identical to SEQ ID NO: 1166
  source 1..33: mol_type = other RNA

SEQ ID NO: 1417 - RNA, 33 nt, synthetic construct; identical to SEQ ID NO: 1167
  source 1..33: mol_type = other RNA

SEQ ID NO: 1418 - RNA, 33 nt, synthetic construct; identical to SEQ ID NO: 1168
  source 1..33: mol_type = other RNA

SEQ ID NO: 1419 - RNA, 33 nt, synthetic construct; identical to SEQ ID NO: 1169
  source 1..33: mol_type = other RNA

SEQ ID NO: 1420 - RNA, 33 nt, synthetic construct; identical to SEQ ID NO: 1170
  source 1..33: mol_type = other RNA

SEQ ID NO: 1421 - RNA, 33 nt, synthetic construct; identical to SEQ ID NO: 1171
  source 1..33: mol_type = other RNA

SEQ ID NO: 1422 - RNA, 33 nt, synthetic construct; identical to SEQ ID NO: 1172
  source 1..33: mol_type = other RNA

SEQ ID NO: 1423 - RNA, 33 nt, synthetic construct; identical to SEQ ID NO: 1173
  source 1..33: mol_type = other RNA

SEQ ID NO: 1424 - RNA, 33 nt, synthetic construct; identical to SEQ ID NO: 1174
  source 1..33: mol_type = other RNA

SEQ ID NO: 1425 - RNA, 33 nt, synthetic construct; identical to SEQ ID NO: 1175
  source 1..33: mol_type = other RNA

SEQ ID NO: 1426 - RNA, 33 nt, synthetic construct; identical to SEQ ID NO: 1176
  source 1..33: mol_type = other RNA

SEQ ID NO: 1427 - RNA, 33 nt, synthetic construct; identical to SEQ ID NO: 1177
  source 1..33: mol_type = other RNA

SEQ ID NO: 1428 - RNA, 33 nt, synthetic construct; identical to SEQ ID NO: 1178
  source 1..33: mol_type = other RNA

SEQ ID NO: 1429 - RNA, 33 nt, synthetic construct; identical to SEQ ID NO: 1179
  source 1..33: mol_type = other RNA

SEQ ID NO: 1430 - RNA, 33 nt, synthetic construct; identical to SEQ ID NO: 1180
  source 1..33: mol_type = other RNA

SEQ ID NO: 1431 - RNA, 33 nt, synthetic construct; identical to SEQ ID NO: 1181
  source 1..33: mol_type = other RNA

SEQ ID NO: 1432 - RNA, 33 nt, synthetic construct; identical to SEQ ID NO: 1182
  source 1..33: mol_type = other RNA

SEQ ID NO: 1433 - RNA, 33 nt, synthetic construct; identical to SEQ ID NO: 1183
  source 1..33: mol_type = other RNA

SEQ ID NO: 1434 - RNA, 33 nt, synthetic construct; identical to SEQ ID NO: 1184
  source 1..33: mol_type = other RNA

SEQ ID NO: 1435 - RNA, 33 nt, synthetic construct; identical to SEQ ID NO: 1185
  source 1..33: mol_type = other RNA

SEQ ID NO: 1436 - RNA, 33 nt, synthetic construct; identical to SEQ ID NO: 1186
  source 1..33: mol_type = other RNA

SEQ ID NO: 1437 - RNA, 33 nt, synthetic construct; identical to SEQ ID NO: 1187
  source 1..33: mol_type = other RNA

SEQ ID NO: 1438 - RNA, 33 nt, synthetic construct; identical to SEQ ID NO: 1188
  source 1..33: mol_type = other RNA

SEQ ID NO: 1439 - RNA, 33 nt, synthetic construct; identical to SEQ ID NO: 1189
  source 1..33: mol_type = other RNA

SEQ ID NO: 1440 - RNA, 33 nt, synthetic construct; identical to SEQ ID NO: 1190
  source 1..33: mol_type = other RNA

SEQ ID NO: 1441 - RNA, 33 nt, synthetic construct; identical to SEQ ID NO: 1191
  source 1..33: mol_type = other RNA

SEQ ID NO: 1442 - RNA, 33 nt, synthetic construct; identical to SEQ ID NO: 1192
  source 1..33: mol_type = other RNA

SEQ ID NO: 1443 - RNA, 33 nt, synthetic construct; identical to SEQ ID NO: 1193
  source 1..33: mol_type = other RNA

SEQ ID NO: 1444 - RNA, 33 nt, synthetic construct; identical to SEQ ID NO: 1194
  source 1..33: mol_type = other RNA

SEQ ID NO: 1445 - RNA, 33 nt, synthetic construct; identical to SEQ ID NO: 1195
  source 1..33: mol_type = other RNA

SEQ ID NO: 1446 - RNA, 33 nt, synthetic construct; identical to SEQ ID NO: 1196
  source 1..33: mol_type = other RNA

SEQ ID NO: 1447 - RNA, 33 nt, synthetic construct; identical to SEQ ID NO: 1197
  source 1..33: mol_type = other RNA

SEQ ID NO: 1448 - RNA, 33 nt, synthetic construct; identical to SEQ ID NO: 1198
  source 1..33: mol_type = other RNA

SEQ ID NO: 1449 - RNA, 33 nt, synthetic construct; identical to SEQ ID NO: 1199
  source 1..33: mol_type = other RNA

SEQ ID NO: 1450 - RNA, 33 nt, synthetic construct; identical to SEQ ID NO: 1200
  source 1..33: mol_type = other RNA

SEQ ID NO: 1451 - RNA, 33 nt, synthetic construct; identical to SEQ ID NO: 1201
  source 1..33: mol_type = other RNA

SEQ ID NO: 1452 - RNA, 33 nt, synthetic construct; identical to SEQ ID NO: 1202
  source 1..33: mol_type = other RNA

SEQ ID NO: 1453 - RNA, 33 nt, synthetic construct; identical to SEQ ID NO: 1203
  source 1..33: mol_type = other RNA

SEQ ID NO: 1454 - RNA, 33 nt, synthetic construct; identical to SEQ ID NO: 1204
  source 1..33: mol_type = other RNA

SEQ ID NO: 1455 - RNA, 33 nt, synthetic construct; identical to SEQ ID NO: 1205
  source 1..33: mol_type = other RNA

SEQ ID NO: 1456 - RNA, 33 nt, synthetic construct; identical to SEQ ID NO: 1206
  source 1..33: mol_type = other RNA

SEQ ID NO: 1457 - RNA, 33 nt, synthetic construct; identical to SEQ ID NO: 1207
  source 1..33: mol_type = other RNA

SEQ ID NO: 1458 - RNA, 33 nt, synthetic construct; identical to SEQ ID NO: 1208
  source 1..33: mol_type = other RNA

SEQ ID NO: 1459 - RNA, 33 nt, synthetic construct; identical to SEQ ID NO: 1209
  source 1..33: mol_type = other RNA

SEQ ID NO: 1460 - RNA, 33 nt, synthetic construct; identical to SEQ ID NO: 1210
  source 1..33: mol_type = other RNA

SEQ ID NO: 1461 - RNA, 33 nt, synthetic construct; identical to SEQ ID NO: 1211
  source 1..33: mol_type = other RNA

SEQ ID NO: 1462 - RNA, 33 nt, synthetic construct; identical to SEQ ID NO: 1212
  source 1..33: mol_type = other RNA

SEQ ID NO: 1463 - RNA, 33 nt, synthetic construct; identical to SEQ ID NO: 1213
  source 1..33: mol_type = other RNA

SEQ ID NO: 1464 - RNA, 33 nt, synthetic construct; identical to SEQ ID NO: 1214
  source 1..33: mol_type = other RNA

SEQ ID NO: 1465 - RNA, 33 nt, synthetic construct; identical to SEQ ID NO: 1215
  source 1..33: mol_type = other RNA

SEQ ID NO: 1466 - RNA, 33 nt, synthetic construct; identical to SEQ ID NO: 1216
  source 1..33: mol_type = other RNA

SEQ ID NO: 1467 - RNA, 33 nt, synthetic construct; identical to SEQ ID NO: 1217
  source 1..33: mol_type = other RNA

SEQ ID NO: 1468 - RNA, 33 nt, synthetic construct; identical to SEQ ID NO: 1218
  source 1..33: mol_type = other RNA

SEQ ID NO: 1469 - RNA, 33 nt, synthetic construct; identical to SEQ ID NO: 1219
  source 1..33: mol_type = other RNA

SEQ ID NO: 1470 - RNA, 33 nt, synthetic construct; identical to SEQ ID NO: 1220
  source 1..33: mol_type = other RNA

SEQ ID NO: 1471 - RNA, 33 nt, synthetic construct; identical to SEQ ID NO: 1221
  source 1..33: mol_type = other RNA

SEQ ID NO: 1472 - RNA, 33 nt, synthetic construct; identical to SEQ ID NO: 1222
  source 1..33: mol_type = other RNA

SEQ ID NO: 1473 - RNA, 33 nt, synthetic construct; identical to SEQ ID NO: 1223
  source 1..33: mol_type = other RNA

SEQ ID NO: 1474 - RNA, 33 nt, synthetic construct; identical to SEQ ID NO: 1224
  source 1..33: mol_type = other RNA

SEQ ID NO: 1475 - RNA, 33 nt, synthetic construct; identical to SEQ ID NO: 1225
  source 1..33: mol_type = other RNA

SEQ ID NO: 1476 - RNA, 33 nt, synthetic construct; identical to SEQ ID NO: 1226
  source 1..33: mol_type = other RNA

SEQ ID NO: 1477 - RNA, 33 nt, synthetic construct; identical to SEQ ID NO: 1227
  source 1..33: mol_type = other RNA

SEQ ID NO: 1478 - RNA, 33 nt, synthetic construct; identical to SEQ ID NO: 1228
  source 1..33: mol_type = other RNA

SEQ ID NO: 1479 - RNA, 33 nt, synthetic construct; identical to SEQ ID NO: 1229
  source 1..33: mol_type = other RNA

SEQ ID NO: 1480 - RNA, 33 nt, synthetic construct; identical to SEQ ID NO: 1230
  source 1..33: mol_type = other RNA

SEQ ID NO: 1481 - RNA, 33 nt, synthetic construct; identical to SEQ ID NO: 1231
  source 1..33: mol_type = other RNA

SEQ ID NO: 1482 - RNA, 33 nt, synthetic construct; identical to SEQ ID NO: 1232
  source 1..33: mol_type = other RNA

SEQ ID NO: 1483 - RNA, 33 nt, synthetic construct; identical to SEQ ID NO: 1233
  source 1..33: mol_type = other RNA

SEQ ID NO: 1484 - RNA, 33 nt, synthetic construct; identical to SEQ ID NO: 1234
  source 1..33: mol_type = other RNA

SEQ ID NO: 1485 - RNA, 33 nt, synthetic construct; identical to SEQ ID NO: 1235
  source 1..33: mol_type = other RNA

SEQ ID NO: 1486 - RNA, 33 nt, synthetic construct; identical to SEQ ID NO: 1236
  source 1..33: mol_type = other RNA

SEQ ID NO: 1487 - RNA, 33 nt, synthetic construct; identical to SEQ ID NO: 1237
  source 1..33: mol_type = other RNA

SEQ ID NO: 1488 - RNA, 33 nt, synthetic construct; identical to SEQ ID NO: 1238
  source 1..33: mol_type = other RNA

SEQ ID NO: 1489 - RNA, 33 nt, synthetic construct; identical to SEQ ID NO: 1239
  source 1..33: mol_type = other RNA

SEQ ID NO: 1490 - RNA, 33 nt, synthetic construct; identical to SEQ ID NO: 1240
  source 1..33: mol_type = other RNA

SEQ ID NO: 1491 - RNA, 33 nt, synthetic construct; identical to SEQ ID NO: 1241
  source 1..33: mol_type = other RNA

SEQ ID NO: 1492 - RNA, 33 nt, synthetic construct; identical to SEQ ID NO: 1242
  source 1..33: mol_type = other RNA

SEQ ID NO: 1493 - RNA, 33 nt, synthetic construct; identical to SEQ ID NO: 1243
  source 1..33: mol_type = other RNA

SEQ ID NO: 1494 - RNA, 33 nt, synthetic construct; identical to SEQ ID NO: 1244
  source 1..33: mol_type = other RNA

SEQ ID NO: 1495 - RNA, 33 nt, synthetic construct; identical to SEQ ID NO: 1245
  source 1..33: mol_type = other RNA

SEQ ID NO: 1496 - RNA, 33 nt, synthetic construct; identical to SEQ ID NO: 1246
  source 1..33: mol_type = other RNA

SEQ ID NO: 1497 - RNA, 33 nt, synthetic construct; identical to SEQ ID NO: 1247
  source 1..33: mol_type = other RNA

SEQ ID NO: 1498 - RNA, 33 nt, synthetic construct; identical to SEQ ID NO: 1248
  source 1..33: mol_type = other RNA

SEQ ID NO: 1499 - RNA, 33 nt, synthetic construct; identical to SEQ ID NO: 1249
  source 1..33: mol_type = other RNA

SEQ ID NO: 1500 - RNA, 33 nt, synthetic construct; identical to SEQ ID NO: 1250
  source 1..33: mol_type = other RNA

SEQ ID NO: 1501 - RNA, 33 nt, synthetic construct; identical to SEQ ID NO: 1251
  source 1..33: mol_type = other RNA

SEQ ID NO: 1502 - RNA, 33 nt, synthetic construct; identical to SEQ ID NO: 1252
  source 1..33: mol_type = other RNA

SEQ ID NO: 1503 - RNA, 33 nt, synthetic construct; identical to SEQ ID NO: 1253
  source 1..33: mol_type = other RNA

SEQ ID NO: 1504 - RNA, 33 nt, synthetic construct; identical to SEQ ID NO: 1254
  source 1..33: mol_type = other RNA

SEQ ID NO: 1505 - RNA, 34 nt, synthetic construct
  source 1..34: mol_type = other RNA
  misc_difference 1: note = 2'-O-methyl modified nucleotide may be 5' phosphate modified
  modified_base 2: mod_base = OTHER; note = 2'-fluoro modified nucleotide
  modified_base 3: mod_base = OTHER; note = 2'-O-methyl modified nucleotide
  modified_base 4: mod_base = OTHER; note = 2'-O-methyl modified nucleotide
  modified_base 5: mod_base = OTHER; note = 2'-O-methyl modified nucleotide
  modified_base 6: mod_base = OTHER; note = 2'-O-methyl modified nucleotide
  modified_base 7: mod_base = OTHER; note = 2'-O-methyl modified nucleotide
  modified_base 8: mod_base = OTHER; note = 2'-O-methyl modified nucleotide
  modified_base 9: mod_base = OTHER; note = 2'-O-methyl modified nucleotide
  modified_base 10: mod_base = OTHER; note = 2'-O-methyl modified nucleotide
  modified_base 11: mod_base = OTHER; note = 2'-O-methyl modified nucleotide
  modified_base 12: mod_base = OTHER; note = 2'-O-methyl modified nucleotide
  modified_base 13: mod_base = OTHER; note = 2'-O-methyl modified nucleotide
  modified_base 14: mod_base = OTHER; note = 2'-fluoro modified nucleotide
  modified_base 15: mod_base = OTHER; note = 2'-O-methyl modified nucleotide
  modified_base 16: mod_base = OTHER; note = 2'-O-methyl modified nucleotide
  modified_base 17: mod_base = OTHER; note = 2'-O-methyl modified nucleotide
  modified_base 18: mod_base = OTHER; note = 2'-O-methyl modified nucleotide
  modified_base 19: mod_base = OTHER; note = 2'-O-methyl modified nucleotide
  modified_base 20: mod_base = OTHER; note = 2'-O-methyl modified nucleotide
  modified_base 21: mod_base = OTHER; note = 2'-O-methyl modified nucleotide
  modified_base 22: mod_base = OTHER; note = 2'-fluoro modified nucleotide
  modified_base 23: mod_base = OTHER; note = 2'-fluoro modified nucleotide
  modified_base 24: mod_base = OTHER; note = 2'-fluoro modified nucleotide
  modified_base 25: mod_base = OTHER; note = 2'-O-methyl modified nucleotide
  modified_base 26: mod_base = OTHER; note = 2'-O-methyl modified nucleotide
  modified_base 27: mod_base = OTHER; note = 2'-O-methyl modified nucleotide
  modified_base 28: mod_base = OTHER; note = 2'-O-methyl modified nucleotide
  modified_base 29: mod_base = OTHER; note = 2'-O-methyl modified nucleotide
  modified_base 30: mod_base = OTHER; note = 2'-O-methyl modified nucleotide
  modified_base 31: mod_base = OTHER; note = 2'-O-methyl modified nucleotide
  modified_base 32: mod_base = OTHER; note = 2'-O-methyl modified nucleotide
  modified_base 33: mod_base = OTHER; note = 2'-O-methyl modified nucleotide
  misc_difference 34: note = 2'-O-methyl modified nucleotide may be trivalent N-acetylgalactosamine modified
nagaaaacccaaatcctcagatttgggttttcta

SEQ ID NO: 1506 - RNA, 34 nt, synthetic construct
  source 1..34: mol_type = other RNA
  misc_difference 1: note = 2'-O-methyl modified nucleotide may be 5' phosphate modified
  modified_base 2: mod_base = OTHER; note = 2'-fluoro modified nucleotide
  modified_base 3: mod_base = OTHER; note = 2'-O-methyl modified nucleotide
  modified_base 4: mod_base = OTHER; note = 2'-O-methyl modified nucleotide
  modified_base 5: mod_base = OTHER; note = 2'-O-methyl modified nucleotide
  modified_base 6: mod_base = OTHER; note = 2'-O-methyl modified nucleotide
  modified_base 7: mod_base = OTHER; note = 2'-O-methyl modified nucleotide
  modified_base 8: mod_base = OTHER; note = 2'-O-methyl modified nucleotide
  modified_base 9: mod_base = OTHER; note = 2'-O-methyl modified nucleotide
  modified_base 10: mod_base = OTHER; note = 2'-O-methyl modified nucleotide
  modified_base 11: mod_base = OTHER; note = 2'-O-methyl modified nucleotide
  modified_base 12: mod_base = OTHER; note = 2'-O-methyl modified nucleotide
  modified_base 13: mod_base = OTHER; note = 2'-O-methyl modified nucleotide
  modified_base 14: mod_base = OTHER; note = 2'-fluoro modified nucleotide
  modified_base 15: mod_base = OTHER; note = 2'-O-methyl modified nucleotide
  modified_base 16: mod_base = OTHER; note = 2'-O-methyl modified nucleotide
  modified_base 17: mod_base = OTHER; note = 2'-O-methyl modified nucleotide
  modified_base 18: mod_base = OTHER; note = 2'-O-methyl modified nucleotide
  modified_base 19: mod_base = OTHER; note = 2'-O-methyl modified nucleotide
  modified_base 20: mod_base = OTHER; note = 2'-O-methyl modified nucleotide
  modified_base 21: mod_base = OTHER; note = 2'-O-methyl modified nucleotide
  modified_base 22: mod_base = OTHER; note = 2'-fluoro modified nucleotide
  modified_base 23: mod_base = OTHER; note = 2'-fluoro modified nucleotide
  modified_base 24: mod_base = OTHER; note = 2'-fluoro modified nucleotide
  modified_base 25: mod_base = OTHER; note = 2'-O-methyl modified nucleotide
  modified_base 26: mod_base = OTHER; note = 2'-O-methyl modified nucleotide
  modified_base 27: mod_base = OTHER; note = 2'-O-methyl modified nucleotide
  modified_base 28: mod_base = OTHER; note = 2'-O-methyl modified nucleotide
  modified_base 29: mod_base = OTHER; note = 2'-O-methyl modified nucleotide
  modified_base 30: mod_base = OTHER; note = 2'-O-methyl modified nucleotide
  modified_base 31: mod_base = OTHER; note = 2'-O-methyl modified nucleotide
  modified_base 32: mod_base = OTHER; note = 2'-O-methyl modified nucleotide
  modified_base 33: mod_base = OTHER; note = 2'-O-methyl modified nucleotide
  misc_difference 34: note = 2'-O-methyl modified nucleotide may be trivalent N-acetylgalactosamine modified
nctgtctgatccatctagcgatggatcagacaga

SEQ ID NO: 1507 - RNA, 34 nt, synthetic construct
  source 1..34: mol_type = other RNA
  misc_difference 1: note = 2'-O-methyl modified nucleotide may be 5' phosphate modified
  modified_base 2: mod_base = OTHER; note = 2'-fluoro modified nucleotide
  modified_base 3: mod_base = OTHER; note = 2'-O-methyl modified nucleotide
  modified_base 4: mod_base = OTHER; note = 2'-O-methyl modified nucleotide
  modified_base 5: mod_base = OTHER; note = 2'-O-methyl modified nucleotide
  modified_base 6: mod_base = OTHER; note = 2'-O-methyl modified nucleotide
  modified_base 7: mod_base = OTHER; note = 2'-O-methyl modified nucleotide
  modified_base 8: mod_base = OTHER; note = 2'-O-methyl modified nucleotide
  modified_base 9: mod_base = OTHER; note = 2'-O-methyl modified nucleotide
  modified_base 10: mod_base = OTHER; note = 2'-O-methyl modified nucleotide
  modified_base 11: mod_base = OTHER; note = 2'-O-methyl modified nucleotide
  modified_base 12: mod_base = OTHER; note = 2'-O-methyl modified nucleotide
  modified_base 13: mod_base = OTHER; note = 2'-O-methyl modified nucleotide
  modified_base 14: mod_base = OTHER; note = 2'-fluoro modified nucleotide
  modified_base 15: mod_base = OTHER; note = 2'-O-methyl modified nucleotide
  modified_base 16: mod_base = OTHER; note = 2'-O-methyl modified nucleotide
  modified_base 17: mod_base = OTHER; note = 2'-O-methyl modified nucleotide
  modified_base 18: mod_base = OTHER; note = 2'-O-methyl modified nucleotide
  modified_base 19: mod_base = OTHER; note = 2'-O-methyl modified nucleotide
  modified_base 20: mod_base = OTHER; note = 2'-O-methyl modified nucleotide
  modified_base 21: mod_base = OTHER; note = 2'-O-methyl modified nucleotide
  modified_base 22: mod_base = OTHER; note = 2'-fluoro modified nucleotide
  modified_base 23: mod_base = OTHER; note = 2'-fluoro modified nucleotide
  modified_base 24: mod_base = OTHER; note = 2'-fluoro modified nucleotide
  modified_base 25: mod_base = OTHER; note = 2'-O-methyl modified nucleotide
  modified_base 26: mod_base = OTHER; note = 2'-O-methyl modified nucleotide
  modified_base 27: mod_base = OTHER; note = 2'-O-methyl modified nucleotide
  modified_base 28: mod_base = OTHER; note = 2'-O-methyl modified nucleotide
  modified_base 29: mod_base = OTHER; note = 2'-O-methyl modified nucleotide
  modified_base 30: mod_base = OTHER; note = 2'-O-methyl modified nucleotide
  modified_base 31: mod_base = OTHER; note = 2'-O-methyl modified nucleotide
  modified_base 32: mod_base = OTHER; note = 2'-O-methyl modified nucleotide
  modified_base 33: mod_base = OTHER; note = 2'-O-methyl modified nucleotide
  misc_difference 34: note = 2'-O-methyl modified nucleotide may be trivalent N-acetylgalactosamine modified
naccatgccacagagactcctctgtggcatggta

SEQ ID NO: 1508 - RNA, 34 nt, synthetic construct
  source 1..34: mol_type = other RNA
  misc_difference 1: note = 2'-O-methyl modified nucleotide may be 5' phosphate modified
  modified_base 2: mod_base = OTHER; note = 2'-fluoro modified nucleotide
  modified_base 3: mod_base = OTHER; note = 2'-O-methyl modified nucleotide
  modified_base 4: mod_base = OTHER; note = 2'-O-methyl modified nucleotide
  modified_base 5: mod_base = OTHER; note = 2'-O-methyl modified nucleotide
  modified_base 6: mod_base = OTHER; note = 2'-O-methyl modified nucleotide
  modified_base 7: mod_base = OTHER; note = 2'-O-methyl modified nucleotide
  modified_base 8: mod_base = OTHER; note = 2'-O-methyl modified nucleotide
  modified_base 9: mod_base = OTHER; note = 2'-O-methyl modified nucleotide
  modified_base 10: mod_base = OTHER; note = 2'-O-methyl modified nucleotide
  modified_base 11: mod_base = OTHER; note = 2'-O-methyl modified nucleotide
  modified_base 12: mod_base = OTHER; note = 2'-O-methyl modified nucleotide
  modified_base 13: mod_base = OTHER; note = 2'-O-methyl modified nucleotide
  modified_base 14: mod_base = OTHER; note = 2'-fluoro modified nucleotide
  modified_base 15: mod_base = OTHER; note = 2'-O-methyl modified nucleotide
  modified_base 16: mod_base = OTHER; note = 2'-O-methyl modified nucleotide
  modified_base 17: mod_base = OTHER; note = 2'-O-methyl modified nucleotide
  modified_base 18: mod_base = OTHER; note = 2'-O-methyl modified nucleotide
  modified_base 19: mod_base = OTHER; note = 2'-O-methyl modified nucleotide
  modified_base 20: mod_base = OTHER; note = 2'-O-methyl modified nucleotide
  modified_base 21: mod_base = OTHER; note = 2'-O-methyl modified nucleotide
  modified_base 22: mod_base = OTHER; note = 2'-fluoro modified nucleotide
  modified_base 23: mod_base = OTHER; note = 2'-fluoro modified nucleotide
  modified_base 24: mod_base = OTHER; note = 2'-fluoro modified nucleotide
  modified_base 25: mod_base = OTHER; note = 2'-O-methyl modified nucleotide
  modified_base 26: mod_base = OTHER; note = 2'-O-methyl modified nucleotide
  modified_base 27: mod_base = OTHER; note = 2'-O-methyl modified nucleotide
  modified_base 28: mod_base = OTHER; note = 2'-O-methyl modified nucleotide
  modified_base 29: mod_base = OTHER; note = 2'-O-methyl modified nucleotide
  modified_base 30: mod_base = OTHER; note = 2'-O-methyl modified nucleotide
  modified_base 31: mod_base = OTHER; note = 2'-O-methyl modified nucleotide
  modified_base 32: mod_base = OTHER; note = 2'-O-methyl modified nucleotide
  modified_base 33: mod_base = OTHER; note = 2'-O-methyl modified nucleotide
  misc_difference 34: note = 2'-O-methyl modified nucleotide may be trivalent N-acetylgalactosamine modified
natccatctagcaccaggtggtgctagatggata

SEQ ID NO: 1509 - RNA, 34 nt, synthetic construct
  source 1..34: mol_type = other RNA
  misc_difference 1: note = 2'-O-methyl modified nucleotide may be 5' phosphate modified
  modified_base 2: mod_base = OTHER; note = 2'-fluoro modified nucleotide
  modified_base 3: mod_base = OTHER; note = 2'-O-methyl modified nucleotide
  modified_base 4: mod_base = OTHER; note = 2'-O-methyl modified nucleotide
  modified_base 5: mod_base = OTHER; note = 2'-O-methyl modified nucleotide
  modified_base 6: mod_base = OTHER; note = 2'-O-methyl modified nucleotide
  modified_base 7: mod_base = OTHER; note = 2'-O-methyl modified nucleotide
  modified_base 8: mod_base = OTHER; note = 2'-O-methyl modified nucleotide
  modified_base 9: mod_base = OTHER; note = 2'-O-methyl modified nucleotide
  modified_base 10: mod_base = OTHER; note = 2'-O-methyl modified nucleotide
  modified_base 11: mod_base = OTHER; note = 2'-O-methyl modified nucleotide
  modified_base 12: mod_base = OTHER; note = 2'-O-methyl modified nucleotide
  modified_base 13: mod_base = OTHER; note = 2'-O-methyl modified nucleotide
  modified_base 14: mod_base = OTHER; note = 2'-fluoro modified nucleotide
  modified_base 15: mod_base = OTHER; note = 2'-O-methyl modified nucleotide
  modified_base 16: mod_base = OTHER; note = 2'-O-methyl modified nucleotide
  modified_base 17: mod_base = OTHER; note = 2'-O-methyl modified nucleotide
  modified_base 18: mod_base = OTHER; note = 2'-O-methyl modified nucleotide
  modified_base 19: mod_base = OTHER; note = 2'-O-methyl modified nucleotide
  modified_base 20: mod_base = OTHER; note = 2'-O-methyl modified nucleotide
  modified_base 21: mod_base = OTHER; note = 2'-O-methyl modified nucleotide
  modified_base 22: mod_base = OTHER; note = 2'-fluoro modified nucleotide
  modified_base 23: mod_base = OTHER; note = 2'-fluoro modified nucleotide
  modified_base 24: mod_base = OTHER; note = 2'-fluoro modified nucleotide
  modified_base 25: mod_base = OTHER; note = 2'-O-methyl modified nucleotide
  modified_base 26: mod_base = OTHER; note = 2'-O-methyl modified nucleotide
  modified_base 27: mod_base = OTHER; note = 2'-O-methyl modified nucleotide
  modified_base 28: mod_base = OTHER; note = 2'-O-methyl modified nucleotide
  modified_base 29: mod_base = OTHER; note = 2'-O-methyl modified nucleotide
  modified_base 30: mod_base = OTHER; note = 2'-O-methyl modified nucleotide
  modified_base 31: mod_base = OTHER; note = 2'-O-methyl modified nucleotide
  modified_base 32: mod_base = OTHER; note = 2'-O-methyl modified nucleotide
  modified_base 33: mod_base = OTHER; note = 2'-O-methyl modified nucleotide
  misc_difference 34: note = 2'-O-methyl modified nucleotide may be trivalent N-acetylgalactosamine modified
naaacccaaatcctcatctgaggatttgggttta

SEQ ID NO: 1510 - RNA, 34 nt, synthetic construct
  source 1..34: mol_type = other RNA
  misc_difference 1: note = 2'-O-methyl modified nucleotide may be 5' phosphate modified
  modified_base 2: mod_base = OTHER; note = 2'-fluoro modified nucleotide
  modified_base 3: mod_base = OTHER; note = 2'-O-methyl modified nucleotide
  modified_base 4: mod_base = OTHER; note = 2'-O-methyl modified nucleotide
  modified_base 5: mod_base = OTHER; note = 2'-O-methyl modified nucleotide
  modified_base 6: mod_base = OTHER; note = 2'-O-methyl modified nucleotide
  modified_base 7: mod_base = OTHER; note = 2'-O-methyl modified nucleotide
  modified_base 8: mod_base = OTHER; note = 2'-O-methyl modified nucleotide
  modified_base 9: mod_base = OTHER; note = 2'-O-methyl modified nucleotide
  modified_base 10: mod_base = OTHER; note = 2'-O-methyl modified nucleotide
  modified_base 11: mod_base = OTHER; note = 2'-O-methyl modified nucleotide
  modified_base 12: mod_base = OTHER; note = 2'-O-methyl modified nucleotide
  modified_base 13: mod_base = OTHER; note = 2'-O-methyl modified nucleotide
  modified_base 14: mod_base = OTHER; note = 2'-fluoro modified nucleotide
  modified_base 15: mod_base = OTHER; note = 2'-O-methyl modified nucleotide
  modified_base 16: mod_base = OTHER; note = 2'-O-methyl modified nucleotide
  modified_base 17: mod_base = OTHER; note = 2'-O-methyl modified nucleotide
  modified_base 18: mod_base = OTHER; note = 2'-O-methyl modified nucleotide
  modified_base 19: mod_base = OTHER; note = 2'-O-methyl modified nucleotide
  modified_base 20: mod_base = OTHER; note = 2'-O-methyl modified nucleotide
  modified_base 21: mod_base = OTHER; note = 2'-O-methyl modified nucleotide
  modified_base 22: mod_base = OTHER; note = 2'-fluoro modified nucleotide
  modified_base 23: mod_base = OTHER; note = 2'-fluoro modified nucleotide
  modified_base 24: mod_base = OTHER; note = 2'-fluoro modified nucleotide
  modified_base 25: mod_base = OTHER; note = 2'-O-methyl modified nucleotide
  modified_base 26: mod_base = OTHER; note = 2'-O-methyl modified nucleotide
  modified_base 27: mod_base = OTHER; note = 2'-O-methyl modified nucleotide
  modified_base 28: mod_base = OTHER; note = 2'-O-methyl modified nucleotide
  modified_base 29: mod_base = OTHER; note = 2'-O-methyl modified nucleotide
  modified_base 30: mod_base = OTHER; note = 2'-O-methyl modified nucleotide
  modified_base 31: mod_base = OTHER; note = 2'-O-methyl modified nucleotide
  modified_base 32: mod_base = OTHER; note = 2'-O-methyl modified nucleotide
  modified_base 33: mod_base = OTHER; note = 2'-O-methyl modified nucleotide
  misc_difference 34: note = 2'-O-methyl modified nucleotide may be trivalent N-acetylgalactosamine modified
nccatctagcaccaggtagctggtgctagatgga

SEQ ID NO: 1511 - RNA, 34 nt, synthetic construct
  source 1..34: mol_type = other RNA
  misc_difference 1: note = 2'-O-methyl modified nucleotide may be 5' phosphate modified
  modified_base 2: mod_base = OTHER; note = 2'-fluoro modified nucleotide
  modified_base 3: mod_base = OTHER; note = 2'-O-methyl modified nucleotide
  modified_base 4: mod_base = OTHER; note = 2'-O-methyl modified nucleotide
  modified_base 5: mod_base = OTHER; note = 2'-O-methyl modified nucleotide
  modified_base 6: mod_base = OTHER; note = 2'-O-methyl modified nucleotide
  modified_base 7: mod_base = OTHER; note = 2'-O-methyl modified nucleotide
  modified_base 8: mod_base = OTHER; note = 2'-O-methyl modified nucleotide
  modified_base 9: mod_base = OTHER; note = 2'-O-methyl modified nucleotide
  modified_base 10: mod_base = OTHER; note = 2'-O-methyl modified nucleotide
  modified_base 11: mod_base = OTHER; note = 2'-O-methyl modified nucleotide
  modified_base 12: mod_base = OTHER; note = 2'-O-methyl modified nucleotide
  modified_base 13: mod_base = OTHER; note = 2'-O-methyl modified nucleotide
  modified_base 14: mod_base = OTHER; note = 2'-fluoro modified nucleotide
  modified_base 15: mod_base = OTHER; note = 2'-O-methyl modified nucleotide
  modified_base 16: mod_base = OTHER; note = 2'-O-methyl modified nucleotide
  modified_base 17: mod_base = OTHER; note = 2'-O-methyl modified nucleotide
  modified_base 18: mod_base = OTHER; note = 2'-O-methyl modified nucleotide
  modified_base 19: mod_base = OTHER; note = 2'-O-methyl modified nucleotide
  modified_base 20: mod_base = OTHER; note = 2'-O-methyl modified nucleotide
  modified_base 21: mod_base = OTHER; note = 2'-O-methyl modified nucleotide
  modified_base 22: mod_base = OTHER; note = 2'-fluoro modified nucleotide
  modified_base 23: mod_base = OTHER; note = 2'-fluoro modified nucleotide
  modified_base 24: mod_base = OTHER; note = 2'-fluoro modified nucleotide
  modified_base 25: mod_base = OTHER; note = 2'-O-methyl modified nucleotide
  modified_base 26: mod_base = OTHER; note = 2'-O-methyl modified nucleotide
  modified_base 27: mod_base = OTHER; note = 2'-O-methyl modified nucleotide
  modified_base 28: mod_base = OTHER; note = 2'-O-methyl modified nucleotide
  modified_base 29: mod_base = OTHER; note = 2'-O-methyl modified nucleotide
  modified_base 30: mod_base = OTHER; note = 2'-O-methyl modified nucleotide
  modified_base 31: mod_base = OTHER; note = 2'-O-methyl modified nucleotide
  modified_base 32: mod_base = OTHER; note = 2'-O-methyl modified nucleotide
  modified_base 33: mod_base = OTHER; note = 2'-O-methyl modified nucleotide
  misc_difference 34: note = 2'-O-methyl modified nucleotide may be trivalent N-acetylgalactosamine modified
naaaacccaaatcctcatcaggatttgggtttta

SEQ ID NO: 1512 - RNA, 34 nt, synthetic construct
  source 1..34: mol_type = other RNA
  misc_difference 1: note = 2'-O-methyl modified nucleotide may be 5' phosphate modified
  modified_base 2: mod_base = OTHER; note = 2'-fluoro modified nucleotide
  modified_base 3: mod_base = OTHER; note = 2'-O-methyl modified nucleotide
  modified_base 4: mod_base = OTHER; note = 2'-O-methyl modified nucleotide
  modified_base 5: mod_base = OTHER; note = 2'-O-methyl modified nucleotide
  modified_base 6: mod_base = OTHER; note = 2'-O-methyl modified nucleotide
  modified_base 7: mod_base = OTHER; note = 2'-O-methyl modified nucleotide
  modified_base 8: mod_base = OTHER; note = 2'-O-methyl modified nucleotide
  modified_base 9: mod_base = OTHER; note = 2'-O-methyl modified nucleotide
  modified_base 10: mod_base = OTHER; note = 2'-O-methyl modified nucleotide
  modified_base 11: mod_base = OTHER; note = 2'-O-methyl modified nucleotide
  modified_base 12: mod_base = OTHER; note = 2'-O-methyl modified nucleotide
  modified_base 13: mod_base = OTHER; note = 2'-O-methyl modified nucleotide
  modified_base 14: mod_base = OTHER; note = 2'-fluoro modified nucleotide
  modified_base 15: mod_base = OTHER; note = 2'-O-methyl modified nucleotide
  modified_base 16: mod_base = OTHER; note = 2'-O-methyl modified nucleotide
  modified_base 17: mod_base = OTHER; note = 2'-O-methyl modified nucleotide
  modified_base 18: mod_base = OTHER; note = 2'-O-methyl modified nucleotide
  modified_base 19: mod_base = OTHER; note = 2'-O-methyl modified nucleotide
  modified_base 20: mod_base = OTHER; note = 2'-O-methyl modified nucleotide
  modified_base 21: mod_base = OTHER; note = 2'-O-methyl modified nucleotide
  modified_base 22: mod_base = OTHER; note = 2'-fluoro modified nucleotide
  modified_base 23: mod_base = OTHER; note = 2'-fluoro modified nucleotide
  modified_base 24: mod_base = OTHER; note = 2'-fluoro modified nucleotide
  modified_base 25: mod_base = OTHER; note = 2'-O-methyl modified nucleotide
  modified_base 26: mod_base = OTHER; note = 2'-O-methyl modified nucleotide
  modified_base 27: mod_base = OTHER; note = 2'-O-methyl modified nucleotide
  modified_base 28: mod_base = OTHER; note = 2'-O-methyl modified nucleotide
  modified_base 29: mod_base = OTHER; note = 2'-O-methyl modified nucleotide
  modified_base 30: mod_base = OTHER; note = 2'-O-methyl modified nucleotide
  modified_base 31: mod_base = OTHER; note = 2'-O-methyl modified nucleotide
  modified_base 32: mod_base = OTHER; note = 2'-O-methyl modified nucleotide
  modified_base 33: mod_base = OTHER; note = 2'-O-methyl modified nucleotide
  misc_difference 34: note = 2'-O-methyl modified nucleotide may be trivalent N-acetylgalactosamine modified
ngtctgatccatctagcactagatggatcagaca

SEQ ID NO: 1513 - RNA, 34 nt, synthetic construct
  source 1..34: mol_type = other RNA
  misc_difference 1: note = 2'-O-methyl modified nucleotide may be 5' phosphate modified
  modified_base 2: mod_base = OTHER; note = 2'-fluoro modified nucleotide
  modified_base 3: mod_base = OTHER; note = 2'-O-methyl modified nucleotide
  modified_base 4: mod_base = OTHER; note = 2'-O-methyl modified nucleotide
  modified_base 5: mod_base = OTHER; note = 2'-O-methyl modified nucleotide
  modified_base 6: mod_base = OTHER; note = 2'-O-methyl modified nucleotide
  modified_base 7: mod_base = OTHER; note = 2'-O-methyl modified nucleotide
  modified_base 8: mod_base = OTHER; note = 2'-O-methyl modified nucleotide
  modified_base 9: mod_base = OTHER; note = 2'-O-methyl modified nucleotide
  modified_base 10: mod_base = OTHER; note = 2'-O-methyl modified nucleotide
  modified_base 11: mod_base = OTHER; note = 2'-O-methyl modified nucleotide
  modified_base 12: mod_base = OTHER; note = 2'-O-methyl modified nucleotide
  modified_base 13: mod_base = OTHER; note = 2'-O-methyl modified nucleotide
  modified_base 14: mod_base = OTHER; note = 2'-fluoro modified nucleotide
  modified_base 15: mod_base = OTHER; note = 2'-O-methyl modified nucleotide
  modified_base 16: mod_base = OTHER; note = 2'-O-methyl modified nucleotide
  modified_base 17: mod_base = OTHER; note = 2'-O-methyl modified nucleotide
  modified_base 18: mod_base = OTHER; note = 2'-O-methyl modified nucleotide
  modified_base 19: mod_base = OTHER; note = 2'-O-methyl modified nucleotide
  modified_base 20: mod_base = OTHER; note = 2'-O-methyl modified nucleotide
  modified_base 21: mod_base = OTHER; note = 2'-O-methyl modified nucleotide
  modified_base 22: mod_base = OTHER; note = 2'-fluoro modified nucleotide
  modified_base 23: mod_base = OTHER; note = 2'-fluoro modified nucleotide
  modified_base 24: mod_base = OTHER; note = 2'-fluoro modified nucleotide
  modified_base 25: mod_base = OTHER; note = 2'-O-methyl modified nucleotide
  modified_base 26: mod_base = OTHER; note = 2'-O-methyl modified nucleotide
  modified_base 27: mod_base = OTHER; note = 2'-O-methyl modified nucleotide
  modified_base 28: mod_base = OTHER; note = 2'-O-methyl modified nucleotide
  modified_base 29: mod_base = OTHER; note = 2'-O-methyl modified nucleotide
  modified_base 30: mod_base = OTHER; note = 2'-O-methyl modified nucleotide
  modified_base 31: mod_base = OTHER; note = 2'-O-methyl modified nucleotide
  modified_base 32: mod_base = OTHER; note = 2'-O-methyl modified nucleotide
  modified_base 33: mod_base = OTHER; note = 2'-O-methyl modified nucleotide
  misc_difference 34: note = 2'-O-methyl modified nucleotide may be trivalent N-acetylgalactosamine modified
nacccaaatcctcatcttgatgaggatttgggta

SEQ ID NO: 1514 - RNA, 34 nt, synthetic construct
  source 1..34: mol_type = other RNA
  misc_difference 1: note = 2'-O-methyl modified nucleotide may be 5' phosphate modified
  modified_base 2: mod_base = OTHER; note = 2'-fluoro modified nucleotide
  modified_base 3: mod_base = OTHER; note = 2'-O-methyl modified nucleotide
  modified_base 4: mod_base = OTHER; note = 2'-O-methyl modified nucleotide
  modified_base 5: mod_base = OTHER; note = 2'-O-methyl modified nucleotide
  modified_base 6: mod_base = OTHER; note = 2'-O-methyl modified nucleotide
  modified_base 7: mod_base = OTHER; note = 2'-O-methyl modified nucleotide
  modified_base 8: mod_base = OTHER; note = 2'-O-methyl modified nucleotide
  modified_base 9: mod_base = OTHER; note = 2'-O-methyl modified nucleotide
  modified_base 10: mod_base = OTHER; note = 2'-O-methyl modified nucleotide
  modified_base 11: mod_base = OTHER; note = 2'-O-methyl modified nucleotide
  modified_base 12: mod_base = OTHER; note = 2'-O-methyl modified nucleotide
  modified_base 13: mod_base = OTHER; note = 2'-O-methyl modified nucleotide
  modified_base 14: mod_base = OTHER; note = 2'-fluoro modified nucleotide
  modified_base 15: mod_base = OTHER; note = 2'-O-methyl modified nucleotide
  modified_base 16: mod_base = OTHER; note = 2'-O-methyl modified nucleotide
  modified_base 17: mod_base = OTHER; note = 2'-O-methyl modified nucleotide
  modified_base 18: mod_base = OTHER; note = 2'-O-methyl modified nucleotide
  modified_base 19: mod_base = OTHER; note = 2'-O-methyl modified nucleotide
  modified_base 20: mod_base = OTHER; note = 2'-O-methyl modified nucleotide
  modified_base 21: mod_base = OTHER; note = 2'-O-methyl modified nucleotide
  modified_base 22: mod_base = OTHER; note = 2'-fluoro modified nucleotide
  modified_base 23: mod_base = OTHER; note = 2'-fluoro modified nucleotide
  modified_base 24: mod_base = OTHER; note = 2'-fluoro modified nucleotide
  modified_base 25: mod_base = OTHER; note = 2'-O-methyl modified nucleotide
  modified_base 26: mod_base = OTHER; note = 2'-O-methyl modified nucleotide
  modified_base 27: mod_base = OTHER; note = 2'-O-methyl modified nucleotide
  modified_base 28: mod_base = OTHER; note = 2'-O-methyl modified nucleotide
  modified_base 29: mod_base = OTHER; note = 2'-O-methyl modified nucleotide
  modified_base 30: mod_base = OTHER; note = 2'-O-methyl modified nucleotide
  modified_base 31: mod_base = OTHER; note = 2'-O-methyl modified nucleotide
  modified_base 32: mod_base = OTHER; note = 2'-O-methyl modified nucleotide
  modified_base 33: mod_base = OTHER; note = 2'-O-methyl modified nucleotide
  misc_difference 34: note = 2'-O-methyl modified nucleotide may be trivalent N-acetylgalactosamine modified
ntccatctagcaccaggtatggtgctagatggaa

SEQ ID NO: 1515 - RNA, 34 nt, synthetic construct
  source 1..34: mol_type = other RNA
  misc_difference 1: note = 2'-O-methyl modified nucleotide may be 5' phosphate modified
  modified_base 2: mod_base = OTHER; note = 2'-fluoro modified nucleotide
  modified_base 3: mod_base = OTHER; note = 2'-O-methyl modified nucleotide
  modified_base 4: mod_base = OTHER; note = 2'-O-methyl modified nucleotide
  modified_base 5: mod_base = OTHER; note = 2'-O-methyl modified nucleotide
  modified_base 6: mod_base = OTHER; note = 2'-O-methyl modified nucleotide
  modified_base 7: mod_base = OTHER; note = 2'-O-methyl modified nucleotide
  modified_base 8: mod_base = OTHER; note = 2'-O-methyl modified nucleotide
  modified_base 9: mod_base = OTHER; note = 2'-O-methyl modified nucleotide
  modified_base 10: mod_base = OTHER; note = 2'-O-methyl modified nucleotide
  modified_base 11: mod_base = OTHER; note = 2'-O-methyl modified nucleotide
  modified_base 12: mod_base = OTHER; note = 2'-O-methyl modified nucleotide
  modified_base 13: mod_base = OTHER; note = 2'-O-methyl modified nucleotide
  modified_base 14: mod_base = OTHER; note = 2'-fluoro modified nucleotide
  modified_base 15: mod_base = OTHER; note = 2'-O-methyl modified nucleotide
  modified_base 16: mod_base = OTHER; note = 2'-O-methyl modified nucleotide
  modified_base 17: mod_base = OTHER; note = 2'-O-methyl modified nucleotide
  modified_base 18: mod_base = OTHER; note = 2'-O-methyl modified nucleotide
  modified_base 19: mod_base = OTHER; note = 2'-O-methyl modified nucleotide
  modified_base 20: mod_base = OTHER; note = 2'-O-methyl modified nucleotide
  modified_base 21: mod_base = OTHER; note = 2'-O-methyl modified nucleotide
  modified_base 22: mod_base = OTHER; note = 2'-fluoro modified nucleotide
  modified_base 23: mod_base = OTHER; note = 2'-fluoro modified nucleotide
  modified_base 24: mod_base = OTHER; note = 2'-fluoro modified nucleotide
  modified_base 25: mod_base = OTHER; note = 2'-O-methyl modified nucleotide
  modified_base 26: mod_base = OTHER; note = 2'-O-methyl modified nucleotide
  modified_base 27: mod_base = OTHER; note = 2'-O-methyl modified nucleotide
  modified_base 28: mod_base = OTHER; note = 2'-O-methyl modified nucleotide
  modified_base 29: mod_base = OTHER; note = 2'-O-methyl modified nucleotide
  modified_base 30: mod_base = OTHER; note = 2'-O-methyl modified nucleotide
  modified_base 31: mod_base = OTHER; note = 2'-O-methyl modified nucleotide
  modified_base 32: mod_base = OTHER; note = 2'-O-methyl modified nucleotide
  modified_base 33: mod_base = OTHER; note = 2'-O-methyl modified nucleotide
  misc_difference 34: note = 2'-O-methyl modified nucleotide may be trivalent N-acetylgalactosamine modified
naacccaaatcctcatctttgaggatttgggtta

SEQ ID NO: 1516 - RNA, 34 nt, synthetic construct
  source 1..34: mol_type = other RNA
  misc_difference 1: note = 2'-O-methyl modified nucleotide may be 5' phosphate modified
  modified_base 2: mod_base = OTHER; note = 2'-fluoro modified nucleotide
  modified_base 3: mod_base = OTHER; note = 2'-O-methyl modified nucleotide
  modified_base 4: mod_base = OTHER; note = 2'-O-methyl modified nucleotide
  modified_base 5: mod_base = OTHER; note = 2'-O-methyl modified nucleotide
  modified_base 6: mod_base = OTHER; note = 2'-O-methyl modified nucleotide
  modified_base 7: mod_base = OTHER; note = 2'-O-methyl modified nucleotide
  modified_base 8: mod_base = OTHER; note = 2'-O-methyl modified nucleotide
  modified_base 9: mod_base = OTHER; note = 2'-O-methyl modified nucleotide
  modified_base 10: mod_base = OTHER; note = 2'-O-methyl modified nucleotide
  modified_base 11: mod_base = OTHER; note = 2'-O-methyl modified nucleotide
  modified_base 12: mod_base = OTHER; note = 2'-O-methyl modified nucleotide
  modified_base 13: mod_base = OTHER; note = 2'-O-methyl modified nucleotide
  modified_base 14: mod_base = OTHER; note = 2'-fluoro modified nucleotide
  modified_base 15: mod_base = OTHER; note = 2'-O-methyl modified nucleotide
  modified_base 16: mod_base = OTHER; note = 2'-O-methyl modified nucleotide
  modified_base 17: mod_base = OTHER; note = 2'-O-methyl modified nucleotide
  modified_base 18: mod_base = OTHER; note = 2'-O-methyl modified nucleotide
  modified_base 19: mod_base = OTHER; note = 2'-O-methyl modified nucleotide
  modified_base 20: mod_base = OTHER; note = 2'-O-methyl modified nucleotide
  modified_base 21: mod_base = OTHER; note = 2'-O-methyl modified nucleotide
  modified_base 22: mod_base = OTHER; note = 2'-fluoro modified nucleotide
  modified_base 23: mod_base = OTHER; note = 2'-fluoro modified nucleotide
  modified_base 24: mod_base = OTHER; note = 2'-fluoro modified nucleotide
  modified_base 25: mod_base = OTHER; note = 2'-O-methyl modified nucleotide
  modified_base 26: mod_base = OTHER; note = 2'-O-methyl modified nucleotide
  modified_base 27: mod_base = OTHER; note = 2'-O-methyl modified nucleotide
  modified_base 28: mod_base = OTHER; note = 2'-O-methyl modified nucleotide
  modified_base 29: mod_base = OTHER; note = 2'-O-methyl modified nucleotide
  modified_base 30: mod_base = OTHER; note = 2'-O-methyl modified nucleotide
  modified_base 31: mod_base = OTHER; note = 2'-O-methyl modified nucleotide
  modified_base 32: mod_base = OTHER; note = 2'-O-methyl modified nucleotide
  modified_base 33: mod_base = OTHER; note = 2'-O-methyl modified nucleotide
  misc_difference 34: note = 2'-O-methyl modified nucleotide may be trivalent N-acetylgalactosamine modified
ncatgccacagagactcaggtctctgtggcatga

SEQ ID NO: 1517 - RNA, 34 nt, synthetic construct
  source 1..34: mol_type = other RNA
  misc_difference 1: note = 2'-O-methyl modified nucleotide may be 5' phosphate modified
  modified_base 2: mod_base = OTHER; note = 2'-fluoro modified nucleotide
  modified_base 3: mod_base = OTHER; note = 2'-O-methyl modified nucleotide
  modified_base 4: mod_base = OTHER; note = 2'-O-methyl modified nucleotide
  modified_base 5: mod_base = OTHER; note = 2'-O-methyl modified nucleotide
  modified_base 6: mod_base = OTHER; note = 2'-O-methyl modified nucleotide
  modified_base 7: mod_base = OTHER; note = 2'-O-methyl modified nucleotide
  modified_base 8: mod_base = OTHER; note = 2'-O-methyl modified nucleotide
  modified_base 9: mod_base = OTHER; note = 2'-O-methyl modified nucleotide
  modified_base 10: mod_base = OTHER; note = 2'-O-methyl modified nucleotide
  modified_base 11: mod_base = OTHER; note = 2'-O-methyl modified nucleotide
  modified_base 12: mod_base = OTHER; note = 2'-O-methyl modified nucleotide
  modified_base 13: mod_base = OTHER; note = 2'-O-methyl modified nucleotide
  modified_base 14: mod_base = OTHER; note = 2'-fluoro modified nucleotide
  modified_base 15: mod_base = OTHER; note = 2'-O-methyl modified nucleotide
  modified_base 16: mod_base = OTHER; note = 2'-O-methyl modified nucleotide
  modified_base 17: mod_base = OTHER; note = 2'-O-methyl modified nucleotide
  modified_base 18: mod_base = OTHER; note = 2'-O-methyl modified nucleotide
  modified_base 19: mod_base = OTHER; note = 2'-O-methyl modified nucleotide
  modified_base 20: mod_base = OTHER; note = 2'-O-methyl modified nucleotide
  modified_base 21: mod_base = OTHER; note = 2'-O-methyl modified nucleotide
  modified_base 22: mod_base = OTHER; note = 2'-fluoro modified nucleotide
  modified_base 23: mod_base = OTHER; note = 2'-fluoro modified nucleotide
  modified_base 24: mod_base = OTHER; note = 2'-fluoro modified nucleotide
  modified_base 25: mod_base = OTHER; note = 2'-O-methyl modified nucleotide
  modified_base 26: mod_base = OTHER; note = 2'-O-methyl modified nucleotide
  modified_base 27: mod_base = OTHER; note = 2'-O-methyl modified nucleotide
  modified_base 28: mod_base = OTHER; note = 2'-O-methyl modified nucleotide
  modified_base 29: mod_base = OTHER; note = 2'-O-methyl modified nucleotide
  modified_base 30: mod_base = OTHER; note = 2'-O-methyl modified nucleotide
  modified_base 31: mod_base = OTHER; note = 2'-O-methyl modified nucleotide
  modified_base 32: mod_base = OTHER; note = 2'-O-methyl modified nucleotide
  modified_base 33: mod_base = OTHER; note = 2'-O-methyl modified nucleotide
  misc_difference 34: note = 2'-O-methyl modified nucleotide may be trivalent N-acetylgalactosamine modified
ntgccacagagactcagaggagtctctgtggcaa

SEQ ID NO: 1518 - RNA, 34 nt, synthetic construct
  source 1..34: mol_type = other RNA
  misc_difference 1: note = 2'-O-methyl modified nucleotide may be 5' phosphate modified
  modified_base 2: mod_base = OTHER; note = 2'-fluoro modified nucleotide
  modified_base 3: mod_base = OTHER; note = 2'-O-methyl modified nucleotide
  modified_base 4: mod_base = OTHER; note = 2'-O-methyl modified nucleotide
  modified_base 5: mod_base = OTHER; note = 2'-O-methyl modified nucleotide
  modified_base 6: mod_base = OTHER; note = 2'-O-methyl modified nucleotide
  modified_base 7: mod_base = OTHER; note = 2'-O-methyl modified nucleotide
  modified_base 8: mod_base = OTHER; note = 2'-O-methyl modified nucleotide
  modified_base 9: mod_base = OTHER; note = 2'-O-methyl modified nucleotide
  modified_base 10: mod_base = OTHER; note = 2'-O-methyl modified nucleotide
  modified_base 11: mod_base = OTHER; note = 2'-O-methyl modified nucleotide
  modified_base 12: mod_base = OTHER; note = 2'-O-methyl modified nucleotide
  modified_base 13: mod_base = OTHER; note = 2'-O-methyl modified nucleotide
  modified_base 14: mod_base = OTHER; note = 2'-fluoro modified nucleotide
  modified_base 15: mod_base = OTHER; note = 2'-O-methyl modified nucleotide
  modified_base 16: mod_base = OTHER; note = 2'-O-methyl modified nucleotide
  modified_base 17: mod_base = OTHER; note = 2'-O-methyl modified nucleotide
  modified_base 18: mod_base = OTHER; note = 2'-O-methyl modified nucleotide
  modified_base 19: mod_base = OTHER; note = 2'-O-methyl modified nucleotide
  modified_base 20: mod_base = OTHER; note = 2'-O-methyl modified nucleotide
  modified_base 21: mod_base = OTHER; note = 2'-O-methyl modified nucleotide
  modified_base 22: mod_base = OTHER; note = 2'-fluoro modified nucleotide
  modified_base 23: mod_base = OTHER; note = 2'-fluoro modified nucleotide
  modified_base 24: mod_base = OTHER; note = 2'-fluoro modified nucleotide
  modified_base 25: mod_base = OTHER; note = 2'-O-methyl modified nucleotide
  modified_base 26: mod_base = OTHER; note = 2'-O-methyl modified nucleotide
  modified_base 27: mod_base = OTHER; note = 2'-O-methyl modified nucleotide
  modified_base 28: mod_base = OTHER; note = 2'-O-methyl modified nucleotide
  modified_base 29: mod_base = OTHER; note = 2'-O-methyl modified nucleotide
  modified_base 30: mod_base = OTHER; note = 2'-O-methyl modified nucleotide
  modified_base 31: mod_base = OTHER; note = 2'-O-methyl modified nucleotide
  modified_base 32: mod_base = OTHER; note = 2'-O-methyl modified nucleotide
  modified_base 33: mod_base = OTHER; note = 2'-O-methyl modified nucleotide
  misc_difference 34: note = 2'-O-methyl modified nucleotide may be trivalent N-acetylgalactosamine modified
natgatgacatggcgggtgcgccatgtcatcata

SEQ ID NO: 1519 - RNA, 34 nt, synthetic construct
  source 1..34: mol_type = other RNA
  misc_difference 1: note = 2'-O-methyl modified nucleotide may be 5' phosphate modified
  modified_base 2: mod_base = OTHER; note = 2'-fluoro modified nucleotide
  modified_base 3: mod_base = OTHER; note = 2'-O-methyl modified nucleotide
  modified_base 4: mod_base = OTHER; note = 2'-O-methyl modified nucleotide
  modified_base 5: mod_base = OTHER; note = 2'-O-methyl modified nucleotide
  modified_base 6: mod_base = OTHER; note = 2'-O-methyl modified nucleotide
  modified_base 7: mod_base = OTHER; note = 2'-O-methyl modified nucleotide
  modified_base 8: mod_base = OTHER; note = 2'-O-methyl modified nucleotide
  modified_base 9: mod_base = OTHER; note = 2'-O-methyl modified nucleotide
  modified_base 10: mod_base = OTHER; note = 2'-O-methyl modified nucleotide
  modified_base 11: mod_base = OTHER; note = 2'-O-methyl modified nucleotide
  modified_base 12: mod_base = OTHER; note = 2'-O-methyl modified nucleotide
  modified_base 13: mod_base = OTHER; note = 2'-O-methyl modified nucleotide
  modified_base 14: mod_base = OTHER; note = 2'-fluoro modified nucleotide
  modified_base 15: mod_base = OTHER; note = 2'-O-methyl modified nucleotide
  modified_base 16: mod_base = OTHER; note = 2'-O-methyl modified nucleotide
  modified_base 17: mod_base = OTHER; note = 2'-O-methyl modified nucleotide
  modified_base 18: mod_base = OTHER; note = 2'-O-methyl modified nucleotide
  modified_base 19: mod_base = OTHER; note = 2'-O-methyl modified nucleotide
  modified_base 20: mod_base = OTHER; note = 2'-O-methyl modified nucleotide
  modified_base 21: mod_base = OTHER; note = 2'-O-methyl modified nucleotide
  modified_base 22: mod_base = OTHER; note = 2'-fluoro modified nucleotide
  modified_base 23: mod_base = OTHER; note = 2'-fluoro modified nucleotide
  modified_base 24: mod_base = OTHER; note = 2'-fluoro modified nucleotide
  modified_base 25: mod_base = OTHER; note = 2'-O-methyl modified nucleotide
  modified_base 26: mod_base = OTHER; note = 2'-O-methyl modified nucleotide
  modified_base 27: mod_base = OTHER; note = 2'-O-methyl modified nucleotide
  modified_base 28: mod_base = OTHER; note = 2'-O-methyl modified nucleotide
  modified_base 29: mod_base = OTHER; note = 2'-O-methyl modified nucleotide
  modified_base 30: mod_base = OTHER; note = 2'-O-methyl modified nucleotide
  modified_base 31: mod_base = OTHER; note = 2'-O-methyl modified nucleotide
  modified_base 32: mod_base = OTHER; note = 2'-O-methyl modified nucleotide
  modified_base 33: mod_base = OTHER; note = 2'-O-methyl modified nucleotide
  misc_difference 34: note = 2'-O-methyl modified nucleotide may be trivalent N-acetylgalactosamine modified
ntccatatccttgactttggtcaaggatatggaa

SEQ ID NO: 1520 - RNA, 34 nt, synthetic construct
  source 1..34: mol_type = other RNA
  misc_difference 1: note = 2'-O-methyl modified nucleotide may be 5' phosphate modified
  modified_base 2: mod_base = OTHER; note = 2'-fluoro modified nucleotide
  modified_base 3: mod_base = OTHER; note = 2'-O-methyl modified nucleotide
  modified_base 4: mod_base = OTHER; note = 2'-O-methyl modified nucleotide
  modified_base 5: mod_base = OTHER; note = 2'-O-methyl modified nucleotide
  modified_base 6: mod_base = OTHER; note = 2'-O-methyl modified nucleotide
  modified_base 7: mod_base = OTHER; note = 2'-O-methyl modified nucleotide
  modified_base 8: mod_base = OTHER; note = 2'-O-methyl modified nucleotide
  modified_base 9: mod_base = OTHER; note = 2'-O-methyl modified nucleotide
  modified_base 10: mod_base = OTHER; note = 2'-O-methyl modified nucleotide
  modified_base 11: mod_base = OTHER; note = 2'-O-methyl modified nucleotide
  modified_base 12: mod_base = OTHER; note = 2'-O-methyl modified nucleotide
  modified_base 13: mod_base = OTHER; note = 2'-O-methyl modified nucleotide
  modified_base 14: mod_base = OTHER; note = 2'-fluoro modified nucleotide
  modified_base 15: mod_base = OTHER; note = 2'-O-methyl modified nucleotide
  modified_base 16: mod_base = OTHER; note = 2'-O-methyl modified nucleotide
  modified_base 17: mod_base = OTHER; note = 2'-O-methyl modified nucleotide
  modified_base 18: mod_base = OTHER; note = 2'-O-methyl modified nucleotide
  modified_base 19: mod_base = OTHER; note = 2'-O-methyl modified nucleotide
  modified_base 20: mod_base = OTHER; note = 2'-O-methyl modified nucleotide
  modified_base 21: mod_base = OTHER; note = 2'-O-methyl modified nucleotide
  modified_base 22: mod_base = OTHER; note = 2'-fluoro modified nucleotide
  modified_base 23: mod_base = OTHER; note = 2'-fluoro modified nucleotide
  modified_base 24: mod_base = OTHER; note = 2'-fluoro modified nucleotide
  modified_base 25: mod_base = OTHER; note = 2'-O-methyl modified nucleotide
  modified_base 26: mod_base = OTHER; note = 2'-O-methyl modified nucleotide
  modified_base 27: mod_base = OTHER; note = 2'-O-methyl modified nucleotide
  modified_base 28: mod_base = OTHER; note = 2'-O-methyl modified nucleotide
  modified_base 29: mod_base = OTHER; note = 2'-O-methyl modified nucleotide
  modified_base 30: mod_base = OTHER; note = 2'-O-methyl modified nucleotide
  modified_base 31: mod_base = OTHER; note = 2'-O-methyl modified nucleotide
  modified_base 32: mod_base = OTHER; note = 2'-O-methyl modified nucleotide
  modified_base 33: mod_base = OTHER; note = 2'-O-methyl modified nucleotide
  misc_difference 34: note = 2'-O-methyl modified nucleotide may be trivalent N-acetylgalactosamine modified
nacaccaacttgaatgaaaattcaagttggtgta

SEQ ID NO: 1521 - RNA, 34 nt, synthetic construct
  source 1..34: mol_type = other RNA
  misc_difference 1: note = 2'-O-methyl modified nucleotide may be 5' phosphate modified
  modified_base 2: mod_base = OTHER; note = 2'-fluoro modified nucleotide
  modified_base 3: mod_base = OTHER; note = 2'-O-methyl modified nucleotide
  modified_base 4: mod_base = OTHER; note = 2'-O-methyl modified nucleotide
  modified_base 5: mod_base = OTHER; note = 2'-O-methyl modified nucleotide
  modified_base 6: mod_base = OTHER; note = 2'-O-methyl modified nucleotide
  modified_base 7: mod_base = OTHER; note = 2'-O-methyl modified nucleotide
  modified_base 8: mod_base = OTHER; note = 2'-O-methyl modified nucleotide
  modified_base 9: mod_base = OTHER; note = 2'-O-methyl modified nucleotide
  modified_base 10: mod_base = OTHER; note = 2'-O-methyl modified nucleotide
  modified_base 11: mod_base = OTHER; note = 2'-O-methyl modified nucleotide
  modified_base 12: mod_base = OTHER; note = 2'-O-methyl modified nucleotide
  modified_base 13: mod_base = OTHER; note = 2'-O-methyl modified nucleotide
  modified_base 14: mod_base = OTHER; note = 2'-fluoro modified nucleotide
  modified_base 15: mod_base = OTHER; note = 2'-O-methyl modified nucleotide
  modified_base 16: mod_base = OTHER; note = 2'-O-methyl modified nucleotide
  modified_base 17: mod_base = OTHER; note = 2'-O-methyl modified nucleotide
  modified_base 18: mod_base = OTHER; note = 2'-O-methyl modified nucleotide
  modified_base 19: mod_base = OTHER; note = 2'-O-methyl modified nucleotide
  modified_base 20: mod_base = OTHER; note = 2'-O-methyl modified nucleotide
  modified_base 21: mod_base = OTHER; note = 2'-O-methyl modified nucleotide
  modified_base 22: mod_base = OTHER; note = 2'-fluoro modified nucleotide
  modified_base 23: mod_base = OTHER; note = 2'-fluoro modified nucleotide
  modified_base 24: mod_base = OTHER; note = 2'-fluoro modified nucleotide
  modified_base 25: mod_base = OTHER; note = 2'-O-methyl modified nucleotide
  modified_base 26: mod_base = OTHER; note = 2'-O-methyl modified nucleotide
  modified_base 27: mod_base = OTHER; note = 2'-O-methyl modified nucleotide
  modified_base 28: mod_base = OTHER; note = 2'-O-methyl modified nucleotide
  modified_base 29: mod_base = OTHER; note = 2'-O-methyl modified nucleotide
  modified_base 30: mod_base = OTHER; note = 2'-O-methyl modified nucleotide
  modified_base 31: mod_base = OTHER; note = 2'-O-methyl modified nucleotide
  modified_base 32: mod_base = OTHER; note = 2'-O-methyl modified nucleotide
  modified_base 33: mod_base = OTHER; note = 2'-O-methyl modified nucleotide
  misc_difference 34: note = 2'-O-methyl modified nucleotide may be trivalent N-acetylgalactosamine modified
ngccacagagactcagagatgagtctctgtggca

SEQ ID NO: 1522 - RNA, 34 nt, synthetic construct
  source 1..34: mol_type = other RNA
  misc_difference 1: note = 2'-O-methyl modified nucleotide may be 5' phosphate modified
  modified_base 2: mod_base = OTHER; note = 2'-fluoro modified nucleotide
  modified_base 3: mod_base = OTHER; note = 2'-O-methyl modified nucleotide
  modified_base 4: mod_base = OTHER; note = 2'-O-methyl modified nucleotide
  modified_base 5: mod_base = OTHER; note = 2'-O-methyl modified nucleotide
  modified_base 6: mod_base = OTHER; note = 2'-O-methyl modified nucleotide
  modified_base 7: mod_base = OTHER; note = 2'-O-methyl modified nucleotide
  modified_base 8: mod_base = OTHER; note = 2'-O-methyl modified nucleotide
  modified_base 9: mod_base = OTHER; note = 2'-O-methyl modified nucleotide
  modified_base 10: mod_base = OTHER; note = 2'-O-methyl modified nucleotide
  modified_base 11: mod_base = OTHER; note = 2'-O-methyl modified nucleotide
  modified_base 12: mod_base = OTHER; note = 2'-O-methyl modified nucleotide
  modified_base 13: mod_base = OTHER; note = 2'-O-methyl modified nucleotide
  modified_base 14: mod_base = OTHER; note = 2'-fluoro modified nucleotide
  modified_base 15: mod_base = OTHER; note = 2'-O-methyl modified nucleotide
  modified_base 16: mod_base = OTHER; note = 2'-O-methyl modified nucleotide
  modified_base 17: mod_base = OTHER; note = 2'-O-methyl modified nucleotide
  modified_base 18: mod_base = OTHER; note = 2'-O-methyl modified nucleotide
  modified_base 19: mod_base = OTHER; note = 2'-O-methyl modified nucleotide
  modified_base 20: mod_base = OTHER; note = 2'-O-methyl modified nucleotide
  modified_base 21: mod_base = OTHER; note = 2'-O-methyl modified nucleotide
  modified_base 22: mod_base = OTHER; note = 2'-fluoro modified nucleotide
  modified_base 23: mod_base = OTHER; note = 2'-fluoro modified nucleotide
  modified_base 24: mod_base = OTHER; note = 2'-fluoro modified nucleotide
  modified_base 25: mod_base = OTHER; note = 2'-O-methyl modified nucleotide
  modified_base 26: mod_base = OTHER; note = 2'-O-methyl modified nucleotide
  modified_base 27: mod_base = OTHER; note = 2'-O-methyl modified nucleotide
  modified_base 28: mod_base = OTHER; note = 2'-O-methyl modified nucleotide
  modified_base 29: mod_base = OTHER; note = 2'-O-methyl modified nucleotide
  modified_base 30: mod_base = OTHER; note = 2'-O-methyl modified nucleotide
  modified_base 31: mod_base = OTHER; note = 2'-O-methyl modified nucleotide
  modified_base 32: mod_base = OTHER; note = 2'-O-methyl modified nucleotide
  modified_base 33: mod_base = OTHER; note = 2'-O-methyl modified nucleotide
  misc_difference 34: note = 2'-O-methyl modified nucleotide may be trivalent N-acetylgalactosamine modified
nccatgccacagagactcatctctgtggcatgga

SEQ ID NO: 1523 - RNA, 34 nt, synthetic construct
  source 1..34: mol_type = other RNA
  misc_difference 1: note = 2'-O-methyl modified nucleotide may be 5' phosphate modified
  modified_base 2: mod_base = OTHER; note = 2'-fluoro modified nucleotide
  modified_base 3: mod_base = OTHER; note = 2'-O-methyl modified nucleotide
  modified_base 4: mod_base = OTHER; note = 2'-O-methyl modified nucleotide
  modified_base 5: mod_base = OTHER; note = 2'-O-methyl modified nucleotide
  modified_base 6: mod_base = OTHER; note = 2'-O-methyl modified nucleotide
  modified_base 7: mod_base = OTHER; note = 2'-O-methyl modified nucleotide
  modified_base 8: mod_base = OTHER; note = 2'-O-methyl modified nucleotide
  modified_base 9: mod_base = OTHER; note = 2'-O-methyl modified nucleotide
  modified_base 10: mod_base = OTHER; note = 2'-O-methyl modified nucleotide
  modified_base 11: mod_base = OTHER; note = 2'-O-methyl modified nucleotide
  modified_base 12: mod_base = OTHER; note = 2'-O-methyl modified nucleotide
  modified_base 13: mod_base = OTHER; note = 2'-O-methyl modified nucleotide
  modified_base 14: mod_base = OTHER; note = 2'-fluoro modified nucleotide
  modified_base 15: mod_base = OTHER; note = 2'-O-methyl modified nucleotide
  modified_base 16: mod_base = OTHER; note = 2'-O-methyl modified nucleotide
  modified_base 17: mod_base = OTHER; note = 2'-O-methyl modified nucleotide
  modified_base 18: mod_base = OTHER; note = 2'-O-methyl modified nucleotide
  modified_base 19: mod_base = OTHER; note = 2'-O-methyl modified nucleotide
  modified_base 20: mod_base = OTHER; note = 2'-O-methyl modified nucleotide
  modified_base 21: mod_base = OTHER; note = 2'-O-methyl modified nucleotide
  modified_base 22: mod_base = OTHER; note = 2'-fluoro modified nucleotide
  modified_base 23: mod_base = OTHER; note = 2'-fluoro modified nucleotide
  modified_base 24: mod_base = OTHER; note = 2'-fluoro modified nucleotide
  modified_base 25: mod_base = OTHER; note = 2'-O-methyl modified nucleotide
  modified_base 26: mod_base = OTHER; note = 2'-O-methyl modified nucleotide
  modified_base 27: mod_base = OTHER; note = 2'-O-methyl modified nucleotide
  modified_base 28: mod_base = OTHER; note = 2'-O-methyl modified nucleotide
  modified_base 29: mod_base = OTHER; note = 2'-O-methyl modified nucleotide
  modified_base 30: mod_base = OTHER; note = 2'-O-methyl modified nucleotide
  modified_base 31: mod_base = OTHER; note = 2'-O-methyl modified nucleotide
  modified_base 32: mod_base = OTHER; note = 2'-O-methyl modified nucleotide
  modified_base 33: mod_base = OTHER; note = 2'-O-methyl modified nucleotide
  misc_difference 34: note = 2'-O-methyl modified nucleotide may be trivalent N-acetylgalactosamine modified
ncatctagcaccaggtagacctggtgctagatga

SEQ ID NO: 1524 - RNA, 34 nt, synthetic construct
  source 1..34: mol_type = other RNA
  misc_difference 1: note = 2'-O-methyl modified nucleotide may be 5' phosphate modified
  modified_base 2: mod_base = OTHER; note = 2'-fluoro modified nucleotide
  modified_base 3: mod_base = OTHER; note = 2'-O-methyl modified nucleotide
  modified_base 4: mod_base = OTHER; note = 2'-O-methyl modified nucleotide
  modified_base 5: mod_base = OTHER; note = 2'-O-methyl modified nucleotide
  modified_base 6: mod_base = OTHER; note = 2'-O-methyl modified nucleotide
  modified_base 7: mod_base = OTHER; note = 2'-O-methyl modified nucleotide
  modified_base 8: mod_base = OTHER; note = 2'-O-methyl modified nucleotide
  modified_base 9: mod_base = OTHER; note = 2'-O-methyl modified nucleotide
  modified_base 10: mod_base = OTHER; note = 2'-O-methyl modified nucleotide
  modified_base 11: mod_base = OTHER; note = 2'-O-methyl modified nucleotide
  modified_base 12: mod_base = OTHER; note = 2'-O-methyl modified nucleotide
  modified_base 13: mod_base = OTHER; note = 2'-O-methyl modified nucleotide
  modified_base 14: mod_base = OTHER; note = 2'-fluoro modified nucleotide
  modified_base 15: mod_base = OTHER; note = 2'-O-methyl modified nucleotide
  modified_base 16: mod_base = OTHER; note = 2'-O-methyl modified nucleotide
  modified_base 17: mod_base = OTHER; note = 2'-O-methyl modified nucleotide
  modified_base 18: mod_base = OTHER; note = 2'-O-methyl modified nucleotide
  modified_base 19: mod_base = OTHER; note = 2'-O-methyl modified nucleotide
  modified_base 20: mod_base = OTHER; note = 2'-O-methyl modified nucleotide
  modified_base 21: mod_base = OTHER; note = 2'-O-methyl modified nucleotide
  modified_base 22: mod_base = OTHER; note = 2'-fluoro modified nucleotide
  modified_base 23: mod_base = OTHER; note = 2'-fluoro modified nucleotide
  modified_base 24: mod_base = OTHER; note = 2'-fluoro modified nucleotide
  modified_base 25: mod_base = OTHER; note = 2'-O-methyl modified nucleotide
  modified_base 26: mod_base = OTHER; note = 2'-O-methyl modified nucleotide
  modified_base 27: mod_base = OTHER; note = 2'-O-methyl modified nucleotide
  modified_base 28: mod_base = OTHER; note = 2'-O-methyl modified nucleotide
  modified_base 29: mod_base = OTHER; note = 2'-O-methyl modified nucleotide
  modified_base 30: mod_base = OTHER; note = 2'-O-methyl modified nucleotide
  modified_base 31: mod_base = OTHER; note = 2'-O-methyl modified nucleotide
  modified_base 32: mod_base = OTHER; note = 2'-O-methyl modified nucleotide
  modified_base 33: mod_base = OTHER; note = 2'-O-methyl modified nucleotide
  misc_difference 34: note = 2'-O-methyl modified nucleotide may be trivalent N-acetylgalactosamine modified
nttccatatccttgacttttcaaggatatggaaa

SEQ ID NO: 1525 - RNA, 34 nt, synthetic construct
  source 1..34: mol_type = other RNA
  misc_difference 1: note = 2'-O-methyl modified nucleotide may be 5' phosphate modified
  modified_base 2: mod_base = OTHER; note = 2'-fluoro modified nucleotide
  modified_base 3: mod_base = OTHER; note = 2'-O-methyl modified nucleotide
  modified_base 4: mod_base = OTHER; note = 2'-O-methyl modified nucleotide
  modified_base 5: mod_base = OTHER; note = 2'-O-methyl modified nucleotide
  modified_base 6: mod_base = OTHER; note = 2'-O-methyl modified nucleotide
  modified_base 7: mod_base = OTHER; note = 2'-O-methyl modified nucleotide
  modified_base 8: mod_base = OTHER; note = 2'-O-methyl modified nucleotide
  modified_base 9: mod_base = OTHER; note = 2'-O-methyl modified nucleotide
  modified_base 10: mod_base = OTHER; note = 2'-O-methyl modified nucleotide
  modified_base 11: mod_base = OTHER; note = 2'-O-methyl modified nucleotide
  modified_base 12: mod_base = OTHER; note = 2'-O-methyl modified nucleotide
  modified_base 13: mod_base = OTHER; note = 2'-O-methyl modified nucleotide
  modified_base 14: mod_base = OTHER; note = 2'-fluoro modified nucleotide
  modified_base 15: mod_base = OTHER; note = 2'-O-methyl modified nucleotide
  modified_base 16: mod_base = OTHER; note = 2'-O-methyl modified nucleotide
  modified_base 17: mod_base = OTHER; note = 2'-O-methyl modified nucleotide
  modified_base 18: mod_base = OTHER; note = 2'-O-methyl modified nucleotide
  modified_base 19: mod_base = OTHER; note = 2'-O-methyl modified nucleotide
  modified_base 20: mod_base = OTHER; note = 2'-O-methyl modified nucleotide
  modified_base 21: mod_base = OTHER; note = 2'-O-methyl modified nucleotide
  modified_base 22: mod_base = OTHER; note = 2'-fluoro modified nucleotide
  modified_base 23: mod_base = OTHER; note = 2'-fluoro modified nucleotide
  modified_base 24: mod_base = OTHER; note = 2'-fluoro modified nucleotide
  modified_base 25: mod_base = OTHER; note = 2'-O-methyl modified nucleotide
  modified_base 26: mod_base = OTHER; note = 2'-O-methyl modified nucleotide
  modified_base 27: mod_base = OTHER; note = 2'-O-methyl modified nucleotide
  modified_base 28: mod_base = OTHER; note = 2'-O-methyl modified nucleotide
  modified_base 29: mod_base = OTHER; note = 2'-O-methyl modified nucleotide
  modified_base 30: mod_base = OTHER; note = 2'-O-methyl modified nucleotide
  modified_base 31: mod_base = OTHER; note = 2'-O-methyl modified nucleotide
  modified_base 32: mod_base = OTHER; note = 2'-O-methyl modified nucleotide
  modified_base 33: mod_base = OTHER; note = 2'-O-methyl modified nucleotide
  misc_difference 34: note = 2'-O-methyl modified nucleotide may be trivalent N-acetylgalactosamine modified
ngatccatctagcaccagggtgctagatggatca

SEQ ID NO: 1526 - RNA, 34 nt, synthetic construct
  source 1..34: mol_type = other RNA
  misc_difference 1: note = 2'-O-methyl modified nucleotide may be 5' phosphate modified
  modified_base 2: mod_base = OTHER; note = 2'-fluoro modified nucleotide
  modified_base 3: mod_base = OTHER; note = 2'-O-methyl modified nucleotide
  modified_base 4: mod_base = OTHER; note = 2'-O-methyl modified nucleotide
  modified_base 5: mod_base = OTHER; note = 2'-O-methyl modified nucleotide
  modified_base 6: mod_base = OTHER; note = 2'-O-methyl modified nucleotide
  modified_base 7: mod_base = OTHER; note = 2'-O-methyl modified nucleotide
  modified_base 8: mod_base = OTHER; note = 2'-O-methyl modified nucleotide
  modified_base 9: mod_base = OTHER; note = 2'-O-methyl modified nucleotide
  modified_base 10: mod_base = OTHER; note = 2'-O-methyl modified nucleotide
  modified_base 11: mod_base = OTHER; note = 2'-O-methyl modified nucleotide
  modified_base 12: mod_base = OTHER; note = 2'-O-methyl modified nucleotide
  modified_base 13: mod_base = OTHER; note = 2'-O-methyl modified nucleotide
  modified_base 14: mod_base = OTHER; note = 2'-fluoro modified nucleotide
  modified_base 15: mod_base = OTHER; note = 2'-O-methyl modified nucleotide
  modified_base 16: mod_base = OTHER; note = 2'-O-methyl modified nucleotide
  modified_base 17: mod_base = OTHER; note = 2'-O-methyl modified nucleotide
  modified_base 18: mod_base = OTHER; note = 2'-O-methyl modified nucleotide
  modified_base 19: mod_base = OTHER; note = 2'-O-methyl modified nucleotide
  modified_base 20: mod_base = OTHER; note = 2'-O-methyl modified nucleotide
  modified_base 21: mod_base = OTHER; note = 2'-O-methyl modified nucleotide
  modified_base 22: mod_base = OTHER; note = 2'-fluoro modified nucleotide
  modified_base 23: mod_base = OTHER; note = 2'-fluoro modified nucleotide
  modified_base 24: mod_base = OTHER; note = 2'-fluoro modified nucleotide
  modified_base 25: mod_base = OTHER; note = 2'-O-methyl modified nucleotide
  modified_base 26: mod_base = OTHER; note = 2'-O-methyl modified nucleotide
  modified_base 27: mod_base = OTHER; note = 2'-O-methyl modified nucleotide
  modified_base 28: mod_base = OTHER; note = 2'-O-methyl modified nucleotide
  modified_base 29: mod_base = OTHER; note = 2'-O-methyl modified nucleotide
  modified_base 30: mod_base = OTHER; note = 2'-O-methyl modified nucleotide
  modified_base 31: mod_base = OTHER; note = 2'-O-methyl modified nucleotide
  modified_base 32: mod_base = OTHER; note = 2'-O-methyl modified nucleotide
  modified_base 33: mod_base = OTHER; note = 2'-O-methyl modified nucleotide
  misc_difference 34: note = 2'-O-methyl modified nucleotide may be trivalent N-acetylgalactosamine modified
nccacagagactcagagacctgagtctctgtgga

SEQ ID NO: 1527 - RNA, 34 nt, synthetic construct
  source 1..34: mol_type = other RNA
  misc_difference 1: note = 2'-O-methyl modified nucleotide may be 5' phosphate modified
  modified_base 2: mod_base = OTHER; note = 2'-fluoro modified nucleotide
  modified_base 3: mod_base = OTHER; note = 2'-O-methyl modified nucleotide
  modified_base 4: mod_base = OTHER; note = 2'-O-methyl modified nucleotide
  modified_base 5: mod_base = OTHER; note = 2'-O-methyl modified nucleotide
  modified_base 6: mod_base = OTHER; note = 2'-O-methyl modified nucleotide
  modified_base 7: mod_base = OTHER; note = 2'-O-methyl modified nucleotide
  modified_base 8: mod_base = OTHER; note = 2'-O-methyl modified nucleotide
  modified_base 9: mod_base = OTHER; note = 2'-O-methyl modified nucleotide
  modified_base 10: mod_base = OTHER; note = 2'-O-methyl modified nucleotide
  modified_base 11: mod_base = OTHER; note = 2'-O-methyl modified nucleotide
  modified_base 12: mod_base = OTHER; note = 2'-O-methyl modified nucleotide
  modified_base 13: mod_base = OTHER; note = 2'-O-methyl modified nucleotide
  modified_base 14: mod_base = OTHER; note = 2'-fluoro modified nucleotide
  modified_base 15: mod_base = OTHER; note = 2'-O-methyl modified nucleotide
  modified_base 16: mod_base = OTHER; note = 2'-O-methyl modified nucleotide
  modified_base 17: mod_base = OTHER; note = 2'-O-methyl modified nucleotide
  modified_base 18: mod_base = OTHER; note = 2'-O-methyl modified nucleotide
  modified_base 19: mod_base = OTHER; note = 2'-O-methyl modified nucleotide
  modified_base 20: mod_base = OTHER; note = 2'-O-methyl modified nucleotide
  modified_base 21: mod_base = OTHER; note = 2'-O-methyl modified nucleotide
  modified_base 22: mod_base = OTHER; note = 2'-fluoro modified nucleotide
  modified_base 23: mod_base = OTHER; note = 2'-fluoro modified nucleotide
  modified_base 24: mod_base = OTHER; note = 2'-fluoro modified nucleotide
  modified_base 25: mod_base = OTHER; note = 2'-O-methyl modified nucleotide
  modified_base 26: mod_base = OTHER; note = 2'-O-methyl modified nucleotide
  modified_base 27: mod_base = OTHER; note = 2'-O-methyl modified nucleotide
  modified_base 28: mod_base = OTHER; note = 2'-O-methyl modified nucleotide
  modified_base 29: mod_base = OTHER; note = 2'-O-methyl modified nucleotide
  modified_base 30: mod_base = OTHER; note = 2'-O-methyl modified nucleotide
  modified_base 31: mod_base = OTHER; note = 2'-O-methyl modified nucleotide
  modified_base 32: mod_base = OTHER; note = 2'-O-methyl modified nucleotide
  modified_base 33: mod_base = OTHER; note = 2'-O-methyl modified nucleotide
  misc_difference 34: note = 2'-O-methyl modified nucleotide may be trivalent N-acetylgalactosamine modified
ntgatccatctagcaccagtgctagatggatcaa

SEQ ID NO: 1528 - RNA, 34 nt, synthetic construct
  source 1..34: mol_type = other RNA
  misc_difference 1: note = 2'-O-methyl modified nucleotide may be 5' phosphate modified
  modified_base 2: mod_base = OTHER; note = 2'-fluoro modified nucleotide
  modified_base 3: mod_base = OTHER; note = 2'-O-methyl modified nucleotide
  modified_base 4: mod_base = OTHER; note = 2'-O-methyl modified nucleotide
  modified_base 5: mod_base = OTHER; note = 2'-O-methyl modified nucleotide
  modified_base 6: mod_base = OTHER; note = 2'-O-methyl modified nucleotide
  modified_base 7: mod_base = OTHER; note = 2'-O-methyl modified nucleotide
  modified_base 8: mod_base = OTHER; note = 2'-O-methyl modified nucleotide
  modified_base 9: mod_base = OTHER; note = 2'-O-methyl modified nucleotide
  modified_base 10: mod_base = OTHER; note = 2'-O-methyl modified nucleotide
  modified_base 11: mod_base = OTHER; note = 2'-O-methyl modified nucleotide
  modified_base 12: mod_base = OTHER; note = 2'-O-methyl modified nucleotide
  modified_base 13: mod_base = OTHER; note = 2'-O-methyl modified nucleotide
  modified_base 14: mod_base = OTHER; note = 2'-fluoro modified nucleotide
  modified_base 15: mod_base = OTHER; note = 2'-O-methyl modified nucleotide
  modified_base 16: mod_base = OTHER; note = 2'-O-methyl modified nucleotide
  modified_base 17: mod_base = OTHER; note = 2'-O-methyl modified nucleotide
  modified_base 18: mod_base = OTHER; note = 2'-O-methyl modified nucleotide
  modified_base 19: mod_base = OTHER; note = 2'-O-methyl modified nucleotide
  modified_base 20: mod_base = OTHER; note = 2'-O-methyl modified nucleotide
  modified_base 21: mod_base = OTHER; note = 2'-O-methyl modified nucleotide
  modified_base 22: mod_base = OTHER; note = 2'-fluoro modified nucleotide
  modified_base 23: mod_base = OTHER; note = 2'-fluoro modified nucleotide
  modified_base 24: mod_base = OTHER; note = 2'-fluoro modified nucleotide
  modified_base 25: mod_base = OTHER; note = 2'-O-methyl modified nucleotide
  modified_base 26: mod_base = OTHER; note = 2'-O-methyl modified nucleotide
  modified_base 27: mod_base = OTHER; note = 2'-O-methyl modified nucleotide
  modified_base 28: mod_base = OTHER; note = 2'-O-methyl modified nucleotide
  modified_base 29: mod_base = OTHER; note = 2'-O-methyl modified nucleotide
  modified_base 30: mod_base = OTHER; note = 2'-O-methyl modified nucleotide
  modified_base 31: mod_base = OTHER; note = 2'-O-methyl modified nucleotide
  modified_base 32: mod_base = OTHER; note = 2'-O-methyl modified nucleotide
  modified_base 33: mod_base = OTHER; note = 2'-O-methyl modified nucleotide
  misc_difference 34: note = 2'-O-methyl modified nucleotide may be trivalent N-acetylgalactosamine modified
nacctccttccgagtcagcactcggaaggaggta

SEQ ID NO: 1529 - RNA, 34 nt, synthetic construct
  source 1..34: mol_type = other RNA
  misc_difference 1: note = 2'-O-methyl modified nucleotide may be 5' phosphate modified
  modified_base 2: mod_base = OTHER; note = 2'-fluoro modified nucleotide
  modified_base 3: mod_base = OTHER; note = 2'-O-methyl modified nucleotide
  modified_base 4: mod_base = OTHER; note = 2'-O-methyl modified nucleotide
  modified_base 5: mod_base = OTHER; note = 2'-O-methyl modified nucleotide
  modified_base 6: mod_base = OTHER; note = 2'-O-methyl modified nucleotide
  modified_base 7: mod_base = OTHER; note = 2'-O-methyl modified nucleotide
  modified_base 8: mod_base = OTHER; note = 2'-O-methyl modified nucleotide
  modified_base 9: mod_base = OTHER; note = 2'-O-methyl modified nucleotide
  modified_base 10: mod_base = OTHER; note = 2'-O-methyl modified nucleotide
  modified_base 11: mod_base = OTHER; note = 2'-O-methyl modified nucleotide
  modified_base 12: mod_base = OTHER; note = 2'-O-methyl modified nucleotide
  modified_base 13: mod_base = OTHER; note = 2'-O-methyl modified nucleotide
  modified_base 14: mod_base = OTHER; note = 2'-fluoro modified nucleotide
  modified_base 15: mod_base = OTHER; note = 2'-O-methyl modified nucleotide
  modified_base 16: mod_base = OTHER; note = 2'-O-methyl modified nucleotide
  modified_base 17: mod_base = OTHER; note = 2'-O-methyl modified nucleotide
  modified_base 18: mod_base = OTHER; note = 2'-O-methyl modified nucleotide
  modified_base 19: mod_base = OTHER; note = 2'-O-methyl modified nucleotide
  modified_base 20: mod_base = OTHER; note = 2'-O-methyl modified nucleotide
  modified_base 21: mod_base = OTHER; note = 2'-O-methyl modified nucleotide
  modified_base 22: mod_base = OTHER; note = 2'-fluoro modified nucleotide
  modified_base 23: mod_base = OTHER; note = 2'-fluoro modified nucleotide
  modified_base 24: mod_base = OTHER; note = 2'-fluoro modified nucleotide
  modified_base 25: mod_base = OTHER; note = 2'-O-methyl modified nucleotide
  modified_base 26: mod_base = OTHER; note = 2'-O-methyl modified nucleotide
  modified_base 27: mod_base = OTHER; note = 2'-O-methyl modified nucleotide
  modified_base 28: mod_base = OTHER; note = 2'-O-methyl modified nucleotide
  modified_base 29: mod_base = OTHER; note = 2'-O-methyl modified nucleotide
  modified_base 30: mod_base = OTHER; note = 2'-O-methyl modified nucleotide
  modified_base 31: mod_base = OTHER; note = 2'-O-methyl modified nucleotide
  modified_base 32: mod_base = OTHER; note = 2'-O-methyl modified nucleotide
  modified_base 33: mod_base = OTHER; note = 2'-O-methyl modified nucleotide
  misc_difference 34: note = 2'-O-methyl modified nucleotide may be trivalent N-acetylgalactosamine modified
ntctgatccatctagcaccctagatggatcagaa

SEQ ID NO: 1530 - RNA, 34 nt, synthetic construct
  source 1..34: mol_type = other RNA
  misc_difference 1: note = 2'-O-methyl modified nucleotide may be 5' phosphate modified
  modified_base 2: mod_base = OTHER; note = 2'-fluoro modified nucleotide
  modified_base 3: mod_base = OTHER; note = 2'-O-methyl modified nucleotide
  modified_base 4: mod_base = OTHER; note = 2'-O-methyl modified nucleotide
  modified_base 5: mod_base = OTHER; note = 2'-O-methyl modified nucleotide
  modified_base 6: mod_base = OTHER; note = 2'-O-methyl modified nucleotide
  modified_base 7: mod_base = OTHER; note = 2'-O-methyl modified nucleotide
  modified_base 8: mod_base = OTHER; note = 2'-O-methyl modified nucleotide
  modified_base 9: mod_base = OTHER; note = 2'-O-methyl modified nucleotide
  modified_base 10: mod_base = OTHER; note = 2'-O-methyl modified nucleotide
  modified_base 11: mod_base = OTHER; note = 2'-O-methyl modified nucleotide
  modified_base 12: mod_base = OTHER; note = 2'-O-methyl modified nucleotide
  modified_base 13: mod_base = OTHER; note = 2'-O-methyl modified nucleotide
  modified_base 14: mod_base = OTHER; note = 2'-fluoro modified nucleotide
  modified_base 15: mod_base = OTHER; note = 2'-O-methyl modified nucleotide
  modified_base 16: mod_base = OTHER; note = 2'-O-methyl modified nucleotide
  modified_base 17: mod_base = OTHER; note = 2'-O-methyl modified nucleotide
  modified_base 18: mod_base = OTHER; note = 2'-O-methyl modified nucleotide
  modified_base 19: mod_base = OTHER; note = 2'-O-methyl modified nucleotide
  modified_base 20: mod_base = OTHER; note = 2'-O-methyl modified nucleotide
  modified_base 21: mod_base = OTHER; note = 2'-O-methyl modified nucleotide
  modified_base 22: mod_base = OTHER; note = 2'-fluoro modified nucleotide
  modified_base 23: mod_base = OTHER; note = 2'-fluoro modified nucleotide
  modified_base 24: mod_base = OTHER; note = 2'-fluoro modified nucleotide
  modified_base 25: mod_base = OTHER; note = 2'-O-methyl modified nucleotide
  modified_base 26: mod_base = OTHER; note = 2'-O-methyl modified nucleotide
  modified_base 27: mod_base = OTHER; note = 2'-O-methyl modified nucleotide
  modified_base 28: mod_base = OTHER; note = 2'-O-methyl modified nucleotide
  modified_base 29: mod_base = OTHER; note = 2'-O-methyl modified nucleotide
  modified_base 30: mod_base = OTHER; note = 2'-O-methyl modified nucleotide
  modified_base 31: mod_base = OTHER; note = 2'-O-methyl modified nucleotide
  modified_base 32: mod_base = OTHER; note = 2'-O-methyl modified nucleotide
  modified_base 33: mod_base = OTHER; note = 2'-O-methyl modified nucleotide
  misc_difference 34: note = 2'-O-methyl modified nucleotide may be trivalent N-acetylgalactosamine modified
ntcttggcaggaaggctccccttcctgccaagaa

SEQ ID NO: 1531 - RNA, 34 nt, synthetic construct
  source 1..34: mol_type = other RNA
  misc_difference 1: note = 2'-O-methyl modified nucleotide may be 5' phosphate modified
  modified_base 2: mod_base = OTHER; note = 2'-fluoro modified nucleotide
  modified_base 3: mod_base = OTHER; note = 2'-O-methyl modified nucleotide
  modified_base 4: mod_base = OTHER; note = 2'-O-methyl modified nucleotide
  modified_base 5: mod_base = OTHER; note = 2'-O-methyl modified nucleotide
  modified_base 6: mod_base = OTHER; note = 2'-O-methyl modified nucleotide
  modified_base 7: mod_base = OTHER; note = 2'-O-methyl modified nucleotide
  modified_base 8: mod_base = OTHER; note = 2'-O-methyl modified nucleotide
  modified_base 9: mod_base = OTHER; note = 2'-O-methyl modified nucleotide
  modified_base 10: mod_base = OTHER; note = 2'-O-methyl modified nucleotide
  modified_base 11: mod_base = OTHER; note = 2'-O-methyl modified nucleotide
  modified_base 12: mod_base = OTHER; note = 2'-O-methyl modified nucleotide
  modified_base 13: mod_base = OTHER; note = 2'-O-methyl modified nucleotide
  modified_base 14: mod_base = OTHER; note = 2'-fluoro modified nucleotide
  modified_base 15: mod_base = OTHER; note = 2'-O-methyl modified nucleotide
  modified_base 16: mod_base = OTHER; note = 2'-O-methyl modified nucleotide
  modified_base 17: mod_base = OTHER; note = 2'-O-methyl modified nucleotide
  modified_base 18: mod_base = OTHER; note = 2'-O-methyl modified nucleotide
  modified_base 19: mod_base = OTHER; note = 2'-O-methyl modified nucleotide
  modified_base 20: mod_base = OTHER; note = 2'-O-methyl modified nucleotide
  modified_base 21: mod_base = OTHER; note = 2'-O-methyl modified nucleotide
  modified_base 22: mod_base = OTHER; note = 2'-fluoro modified nucleotide
  modified_base 23: mod_base = OTHER; note = 2'-fluoro modified nucleotide
  modified_base 24: mod_base = OTHER; note = 2'-fluoro modified nucleotide
  modified_base 25: mod_base = OTHER; note = 2'-O-methyl modified nucleotide
  modified_base 26: mod_base = OTHER; note = 2'-O-methyl modified nucleotide
  modified_base 27: mod_base = OTHER; note = 2'-O-methyl modified nucleotide
  modified_base 28: mod_base = OTHER; note = 2'-O-methyl modified nucleotide
  modified_base 29: mod_base = OTHER; note = 2'-O-methyl modified nucleotide
  modified_base 30: mod_base = OTHER; note = 2'-O-methyl modified nucleotide
  modified_base 31: mod_base = OTHER; note = 2'-O-methyl modified nucleotide
  modified_base 32: mod_base = OTHER; note = 2'-O-methyl modified nucleotide
  modified_base 33: mod_base = OTHER; note = 2'-O-methyl modified nucleotide
  misc_difference 34: note = 2'-O-methyl modified nucleotide may be trivalent N-acetylgalactosamine modified
ntctagcaccaggtagatgtacctggtgctagaa

SEQ ID NO: 1532 - RNA, 34 nt, synthetic construct
  source 1..34: mol_type = other RNA
  misc_difference 1: note = 2'-O-methyl modified nucleotide may be 5' phosphate modified
  modified_base 2: mod_base = OTHER; note = 2'-fluoro modified nucleotide
  modified_base 3: mod_base = OTHER; note = 2'-O-methyl modified nucleotide
  modified_base 4: mod_base = OTHER; note = 2'-O-methyl modified nucleotide
  modified_base 5: mod_base = OTHER; note = 2'-O-methyl modified nucleotide
  modified_base 6: mod_base = OTHER; note = 2'-O-methyl modified nucleotide
  modified_base 7: mod_base = OTHER; note = 2'-O-methyl modified nucleotide
  modified_base 8: mod_base = OTHER; note = 2'-O-methyl modified nucleotide
  modified_base 9: mod_base = OTHER; note = 2'-O-methyl modified nucleotide
  modified_base 10: mod_base = OTHER; note = 2'-O-methyl modified nucleotide
  modified_base 11: mod_base = OTHER; note = 2'-O-methyl modified nucleotide
  modified_base 12: mod_base = OTHER; note = 2'-O-methyl modified nucleotide
  modified_base 13: mod_base = OTHER; note = 2'-O-methyl modified nucleotide
  modified_base 14: mod_base = OTHER; note = 2'-fluoro modified nucleotide
  modified_base 15: mod_base = OTHER; note = 2'-O-methyl modified nucleotide
  modified_base 16: mod_base = OTHER; note = 2'-O-methyl modified nucleotide
  modified_base 17: mod_base = OTHER; note = 2'-O-methyl modified nucleotide
  modified_base 18: mod_base = OTHER; note = 2'-O-methyl modified nucleotide
  modified_base 19: mod_base = OTHER; note = 2'-O-methyl modified nucleotide
  modified_base 20: mod_base = OTHER; note = 2'-O-methyl modified nucleotide
  modified_base 21: mod_base = OTHER; note = 2'-O-methyl modified nucleotide
  modified_base 22: mod_base = OTHER; note = 2'-fluoro modified nucleotide
  modified_base 23: mod_base = OTHER; note = 2'-fluoro modified nucleotide
  modified_base 24: mod_base = OTHER; note = 2'-fluoro modified nucleotide
  modified_base 25: mod_base = OTHER; note = 2'-O-methyl modified nucleotide
  modified_base 26: mod_base = OTHER; note = 2'-O-methyl modified nucleotide
  modified_base 27: mod_base = OTHER; note = 2'-O-methyl modified nucleotide
  modified_base 28: mod_base = OTHER; note = 2'-O-methyl modified nucleotide
  modified_base 29: mod_base = OTHER; note = 2'-O-methyl modified nucleotide
  modified_base 30: mod_base = OTHER; note = 2'-O-methyl modified nucleotide
  modified_base 31: mod_base = OTHER; note = 2'-O-methyl modified nucleotide
  modified_base 32: mod_base = OTHER; note = 2'-O-methyl modified nucleotide
  modified_base 33: mod_base = OTHER; note = 2'-O-methyl modified nucleotide
  misc_difference 34: note = 2'-O-methyl modified nucleotide may be trivalent N-acetylgalactosamine modified
naagtactcagacaccacagtgtctgagtactta

SEQ ID NO: 1533 - RNA, 34 nt, synthetic construct
  source 1..34: mol_type = other RNA
  misc_difference 1: note = 2'-O-methyl modified nucleotide may be 5' phosphate modified
  modified_base 2: mod_base = OTHER; note = 2'-fluoro modified nucleotide
  modified_base 3: mod_base = OTHER; note = 2'-O-methyl modified nucleotide
  modified_base 4: mod_base = OTHER; note = 2'-O-methyl modified nucleotide
  modified_base 5: mod_base = OTHER; note = 2'-O-methyl modified nucleotide
  modified_base 6: mod_base = OTHER; note = 2'-O-methyl modified nucleotide
  modified_base 7: mod_base = OTHER; note = 2'-O-methyl modified nucleotide
  modified_base 8: mod_base = OTHER; note = 2'-O-methyl modified nucleotide
  modified_base 9: mod_base = OTHER; note = 2'-O-methyl modified nucleotide
  modified_base 10: mod_base = OTHER; note = 2'-O-methyl modified nucleotide
  modified_base 11: mod_base = OTHER; note = 2'-O-methyl modified nucleotide
  modified_base 12: mod_base = OTHER; note = 2'-O-methyl modified nucleotide
  modified_base 13: mod_base = OTHER; note = 2'-O-methyl modified nucleotide
  modified_base 14: mod_base = OTHER; note = 2'-fluoro modified nucleotide
  modified_base 15: mod_base = OTHER; note = 2'-O-methyl modified nucleotide
  modified_base 16: mod_base = OTHER; note = 2'-O-methyl modified nucleotide
  modified_base 17: mod_base = OTHER; note = 2'-O-methyl modified nucleotide
  modified_base 18: mod_base = OTHER; note = 2'-O-methyl modified nucleotide
  modified_base 19: mod_base = OTHER; note = 2'-O-methyl modified nucleotide
  modified_base 20: mod_base = OTHER; note = 2'-O-methyl modified nucleotide
  modified_base 21: mod_base = OTHER; note = 2'-O-methyl modified nucleotide
  modified_base 22: mod_base = OTHER; note = 2'-fluoro modified nucleotide
  modified_base 23: mod_base = OTHER; note = 2'-fluoro modified nucleotide
  modified_base 24: mod_base = OTHER; note = 2'-fluoro modified nucleotide
  modified_base 25: mod_base = OTHER; note = 2'-O-methyl modified nucleotide
  modified_base 26: mod_base = OTHER; note = 2'-O-methyl modified nucleotide
  modified_base 27: mod_base = OTHER; note = 2'-O-methyl modified nucleotide
  modified_base 28: mod_base = OTHER; note = 2'-O-methyl modified nucleotide
  modified_base 29: mod_base = OTHER; note = 2'-O-methyl modified nucleotide
  modified_base 30: mod_base = OTHER; note = 2'-O-methyl modified nucleotide
  modified_base 31: mod_base = OTHER; note = 2'-O-methyl modified nucleotide
  modified_base 32: mod_base = OTHER; note = 2'-O-methyl modified nucleotide
  modified_base 33: mod_base = OTHER; note = 2'-O-methyl modified nucleotide
  misc_difference 34: note = 2'-O-methyl modified nucleotide may be trivalent N-acetylgalactosamine modified
ntgtctgatccatctagcaagatggatcagacaa

SEQ ID NO: 1534 - RNA, 34 nt, synthetic construct
  source 1..34: mol_type = other RNA
  misc_difference 1: note = 2'-O-methyl modified nucleotide may be 5' phosphate modified
  modified_base 2: mod_base = OTHER; note = 2'-fluoro modified nucleotide
  modified_base 3: mod_base = OTHER; note = 2'-O-methyl modified nucleotide
  modified_base 4: mod_base = OTHER; note = 2'-O-methyl modified nucleotide
  modified_base 5: mod_base = OTHER; note = 2'-O-methyl modified nucleotide
  modified_base 6: mod_base = OTHER; note = 2'-O-methyl modified nucleotide
  modified_base 7: mod_base = OTHER; note = 2'-O-methyl modified nucleotide
  modified_base 8: mod_base = OTHER; note = 2'-O-methyl modified nucleotide
  modified_base 9: mod_base = OTHER; note = 2'-O-methyl modified nucleotide
  modified_base 10: mod_base = OTHER; note = 2'-O-methyl modified nucleotide
  modified_base 11: mod_base = OTHER; note = 2'-O-methyl modified nucleotide
  modified_base 12: mod_base = OTHER; note = 2'-O-methyl modified nucleotide
  modified_base 13: mod_base = OTHER; note = 2'-O-methyl modified nucleotide
  modified_base 14: mod_base = OTHER; note = 2'-fluoro modified nucleotide
  modified_base 15: mod_base = OTHER; note = 2'-O-methyl modified nucleotide
  modified_base 16: mod_base = OTHER; note = 2'-O-methyl modified nucleotide
  modified_base 17: mod_base = OTHER; note = 2'-O-methyl modified nucleotide
  modified_base 18: mod_base = OTHER; note = 2'-O-methyl modified nucleotide
  modified_base 19: mod_base = OTHER; note = 2'-O-methyl modified nucleotide
  modified_base 20: mod_base = OTHER; note = 2'-O-methyl modified nucleotide
  modified_base 21: mod_base = OTHER; note = 2'-O-methyl modified nucleotide
  modified_base 22: mod_base = OTHER; note = 2'-fluoro modified nucleotide
  modified_base 23: mod_base = OTHER; note = 2'-fluoro modified nucleotide
  modified_base 24: mod_base = OTHER; note = 2'-fluoro modified nucleotide
  modified_base 25: mod_base = OTHER; note = 2'-O-methyl modified nucleotide
  modified_base 26: mod_base = OTHER; note = 2'-O-methyl modified nucleotide
  modified_base 27: mod_base = OTHER; note = 2'-O-methyl modified nucleotide
  modified_base 28: mod_base = OTHER; note = 2'-O-methyl modified nucleotide
  modified_base 29: mod_base = OTHER; note = 2'-O-methyl modified nucleotide
  modified_base 30: mod_base = OTHER; note = 2'-O-methyl modified nucleotide
  modified_base 31: mod_base = OTHER; note = 2'-O-methyl modified nucleotide
  modified_base 32: mod_base = OTHER; note = 2'-O-methyl modified nucleotide
  modified_base 33: mod_base = OTHER; note = 2'-O-methyl modified nucleotide
  misc_difference 34: note = 2'-O-methyl modified nucleotide may be trivalent N-acetylgalactosamine modified
natctagcaccaggtagatacctggtgctagata

SEQ ID NO: 1535 - RNA, 34 nt, synthetic construct
  source 1..34: mol_type = other RNA
  misc_difference 1: note = 2'-O-methyl modified nucleotide may be 5' phosphate modified
  modified_base 2: mod_base = OTHER; note = 2'-fluoro modified nucleotide
  modified_base 3: mod_base = OTHER; note = 2'-O-methyl modified nucleotide
  modified_base 4: mod_base = OTHER; note = 2'-O-methyl modified nucleotide
  modified_base 5: mod_base = OTHER; note = 2'-O-methyl modified nucleotide
  modified_base 6: mod_base = OTHER; note = 2'-O-methyl modified nucleotide
  modified_base 7: mod_base = OTHER; note = 2'-O-methyl modified nucleotide
  modified_base 8: mod_base = OTHER; note = 2'-O-methyl modified nucleotide
  modified_base 9: mod_base = OTHER; note = 2'-O-methyl modified nucleotide
  modified_base 10: mod_base = OTHER; note = 2'-O-methyl modified nucleotide
  modified_base 11: mod_base = OTHER; note = 2'-O-methyl modified nucleotide
  modified_base 12: mod_base = OTHER; note = 2'-O-methyl modified nucleotide
  modified_base 13: mod_base = OTHER; note = 2'-O-methyl modified nucleotide
  modified_base 14: mod_base = OTHER; note = 2'-fluoro modified nucleotide
  modified_base 15: mod_base = OTHER; note = 2'-O-methyl modified nucleotide
  modified_base 16: mod_base = OTHER; note = 2'-O-methyl modified nucleotide
  modified_base 17: mod_base = OTHER; note = 2'-O-methyl modified nucleotide
  modified_base 18: mod_base = OTHER; note = 2'-O-methyl modified nucleotide
  modified_base 19: mod_base = OTHER; note = 2'-O-methyl modified nucleotide
  modified_base 20: mod_base = OTHER; note = 2'-O-methyl modified nucleotide
  modified_base 21: mod_base = OTHER; note = 2'-O-methyl modified nucleotide
  modified_base 22: mod_base = OTHER; note = 2'-fluoro modified nucleotide
  modified_base 23: mod_base = OTHER; note = 2'-fluoro modified nucleotide
  modified_base 24: mod_base = OTHER; note = 2'-fluoro modified nucleotide
  modified_base 25: mod_base = OTHER; note = 2'-O-methyl modified nucleotide
  modified_base 26: mod_base = OTHER; note = 2'-O-methyl modified nucleotide
  modified_base 27: mod_base = OTHER; note = 2'-O-methyl modified nucleotide
  modified_base 28: mod_base = OTHER; note = 2'-O-methyl modified nucleotide
  modified_base 29: mod_base = OTHER; note = 2'-O-methyl modified nucleotide
  modified_base 30: mod_base = OTHER; note = 2'-O-methyl modified nucleotide
  modified_base 31: mod_base = OTHER; note = 2'-O-methyl modified nucleotide
  modified_base 32: mod_base = OTHER; note = 2'-O-methyl modified nucleotide
  modified_base 33: mod_base = OTHER; note = 2'-O-methyl modified nucleotide
  misc_difference 34: note = 2'-O-methyl modified nucleotide may be trivalent N-acetylgalactosamine modified
ncaaatcctcatcttggagaagatgaggatttga

SEQ ID NO: 1536 - RNA, 34 nt, synthetic construct
  source 1..34: mol_type = other RNA
  misc_difference 1: note = 2'-O-methyl modified nucleotide may be 5' phosphate modified
  modified_base 2: mod_base = OTHER; note = 2'-fluoro modified nucleotide
  modified_base 3: mod_base = OTHER; note = 2'-O-methyl modified nucleotide
  modified_base 4: mod_base = OTHER; note = 2'-O-methyl modified nucleotide
  modified_base 5: mod_base = OTHER; note = 2'-O-methyl modified nucleotide
  modified_base 6: mod_base = OTHER; note = 2'-O-methyl modified nucleotide
  modified_base 7: mod_base = OTHER; note = 2'-O-methyl modified nucleotide
  modified_base 8: mod_base = OTHER; note = 2'-O-methyl modified nucleotide
  modified_base 9: mod_base = OTHER; note = 2'-O-methyl modified nucleotide
  modified_base 10: mod_base = OTHER; note = 2'-O-methyl modified nucleotide
  modified_base 11: mod_base = OTHER; note = 2'-O-methyl modified nucleotide
  modified_base 12: mod_base = OTHER; note = 2'-O-methyl modified nucleotide
  modified_base 13: mod_base = OTHER; note = 2'-O-methyl modified nucleotide
  modified_base 14: mod_base = OTHER; note = 2'-fluoro modified nucleotide
  modified_base 15: mod_base = OTHER; note = 2'-O-methyl modified nucleotide
  modified_base 16: mod_base = OTHER; note = 2'-O-methyl modified nucleotide
  modified_base 17: mod_base = OTHER; note = 2'-O-methyl modified nucleotide
  modified_base 18: mod_base = OTHER; note = 2'-O-methyl modified nucleotide
  modified_base 19: mod_base = OTHER; note = 2'-O-methyl modified nucleotide
  modified_base 20: mod_base = OTHER; note = 2'-O-methyl modified nucleotide
  modified_base 21: mod_base = OTHER; note = 2'-O-methyl modified nucleotide
  modified_base 22: mod_base = OTHER; note = 2'-fluoro modified nucleotide
  modified_base 23: mod_base = OTHER; note = 2'-fluoro modified nucleotide
  modified_base 24: mod_base = OTHER; note = 2'-fluoro modified nucleotide
  modified_base 25: mod_base = OTHER; note = 2'-O-methyl modified nucleotide
  modified_base 26: mod_base = OTHER; note = 2'-O-methyl modified nucleotide
  modified_base 27: mod_base = OTHER; note = 2'-O-methyl modified nucleotide
  modified_base 28: mod_base = OTHER; note = 2'-O-methyl modified nucleotide
  modified_base 29: mod_base = OTHER; note = 2'-O-methyl modified nucleotide
  modified_base 30: mod_base = OTHER; note = 2'-O-methyl modified nucleotide
  modified_base 31: mod_base = OTHER; note = 2'-O-methyl modified nucleotide
  modified_base 32: mod_base = OTHER; note = 2'-O-methyl modified nucleotide
  modified_base 33: mod_base = OTHER; note = 2'-O-methyl modified nucleotide
  misc_difference 34: note = 2'-O-methyl modified nucleotide may be trivalent N-acetylgalactosamine modified
natagtcataaaattcaggaattttatgactata

SEQ ID NO: 1537 - RNA, 34 nt, synthetic construct
  source 1..34: mol_type = other RNA
  misc_difference 1: note = 2'-O-methyl modified nucleotide may be 5' phosphate modified
  modified_base 2: mod_base = OTHER; note = 2'-fluoro modified nucleotide
  modified_base 3: mod_base = OTHER; note = 2'-O-methyl modified nucleotide
  modified_base 4: mod_base = OTHER; note = 2'-O-methyl modified nucleotide
  modified_base 5: mod_base = OTHER; note = 2'-O-methyl modified nucleotide
  modified_base 6: mod_base = OTHER; note = 2'-O-methyl modified nucleotide
  modified_base 7: mod_base = OTHER; note = 2'-O-methyl modified nucleotide
  modified_base 8: mod_base = OTHER; note = 2'-O-methyl modified nucleotide
  modified_base 9: mod_base = OTHER; note = 2'-O-methyl modified nucleotide
  modified_base 10: mod_base = OTHER; note = 2'-O-methyl modified nucleotide
  modified_base 11: mod_base = OTHER; note = 2'-O-methyl modified nucleotide
  modified_base 12: mod_base = OTHER; note = 2'-O-methyl modified nucleotide
  modified_base 13: mod_base = OTHER; note = 2'-O-methyl modified nucleotide
  modified_base 14: mod_base = OTHER; note = 2'-fluoro modified nucleotide
  modified_base 15: mod_base = OTHER; note = 2'-O-methyl modified nucleotide
  modified_base 16: mod_base = OTHER; note = 2'-O-methyl modified nucleotide
  modified_base 17: mod_base = OTHER; note = 2'-O-methyl modified nucleotide
  modified_base 18: mod_base = OTHER; note = 2'-O-methyl modified nucleotide
  modified_base 19: mod_base = OTHER; note = 2'-O-methyl modified nucleotide
  modified_base 20: mod_base = OTHER; note = 2'-O-methyl modified nucleotide
  modified_base 21: mod_base = OTHER; note = 2'-O-methyl modified nucleotide
  modified_base 22: mod_base = OTHER; note = 2'-fluoro modified nucleotide
  modified_base 23: mod_base = OTHER; note = 2'-fluoro modified nucleotide
  modified_base 24: mod_base = OTHER; note = 2'-fluoro modified nucleotide
  modified_base 25: mod_base = OTHER; note = 2'-O-methyl modified nucleotide
  modified_base 26: mod_base = OTHER; note = 2'-O-methyl modified nucleotide
  modified_base 27: mod_base = OTHER; note = 2'-O-methyl modified nucleotide
  modified_base 28: mod_base = OTHER; note = 2'-O-methyl modified nucleotide
  modified_base 29: mod_base = OTHER; note = 2'-O-methyl modified nucleotide
  modified_base 30: mod_base = OTHER; note = 2'-O-methyl modified nucleotide
  modified_base 31: mod_base = OTHER; note = 2'-O-methyl modified nucleotide
  modified_base 32: mod_base = OTHER; note = 2'-O-methyl modified nucleotide
  modified_base 33: mod_base = OTHER; note = 2'-O-methyl modified nucleotide
  misc_difference 34: note = 2'-O-methyl modified nucleotide may be trivalent N-acetylgalactosamine modified
naggatgatgacatggcggcatgtcatcatccta

SEQ ID NO: 1538 - RNA, 34 nt, synthetic construct
  source 1..34: mol_type = other RNA
  misc_difference 1: note = 2'-O-methyl modified nucleotide may be 5' phosphate modified
  modified_base 2: mod_base = OTHER; note = 2'-fluoro modified nucleotide
  modified_base 3: mod_base = OTHER; note = 2'-O-methyl modified nucleotide
  modified_base 4: mod_base = OTHER; note = 2'-O-methyl modified nucleotide
  modified_base 5: mod_base = OTHER; note = 2'-O-methyl modified nucleotide
  modified_base 6: mod_base = OTHER; note = 2'-O-methyl modified nucleotide
  modified_base 7: mod_base = OTHER; note = 2'-O-methyl modified nucleotide
  modified_base 8: mod_base = OTHER; note = 2'-O-methyl modified nucleotide
  modified_base 9: mod_base = OTHER; note = 2'-O-methyl modified nucleotide
  modified_base 10: mod_base = OTHER; note = 2'-O-methyl modified nucleotide
  modified_base 11: mod_base = OTHER; note = 2'-O-methyl modified nucleotide
  modified_base 12: mod_base = OTHER; note = 2'-O-methyl modified nucleotide
  modified_base 13: mod_base = OTHER; note = 2'-O-methyl modified nucleotide
  modified_base 14: mod_base = OTHER; note = 2'-fluoro modified nucleotide
  modified_base 15: mod_base = OTHER; note = 2'-O-methyl modified nucleotide
  modified_base 16: mod_base = OTHER; note = 2'-O-methyl modified nucleotide
  modified_base 17: mod_base = OTHER; note = 2'-O-methyl modified nucleotide
  modified_base 18: mod_base = OTHER; note = 2'-O-methyl modified nucleotide
  modified_base 19: mod_base = OTHER; note = 2'-O-methyl modified nucleotide
  modified_base 20: mod_base = OTHER; note = 2'-O-methyl modified nucleotide
  modified_base 21: mod_base = OTHER; note = 2'-O-methyl modified nucleotide
  modified_base 22: mod_base = OTHER; note = 2'-fluoro modified nucleotide
  modified_base 23: mod_base = OTHER; note = 2'-fluoro modified nucleotide
  modified_base 24: mod_base = OTHER; note = 2'-fluoro modified nucleotide
  modified_base 25: mod_base = OTHER; note = 2'-O-methyl modified nucleotide
  modified_base 26: mod_base = OTHER; note = 2'-O-methyl modified nucleotide
  modified_base 27: mod_base = OTHER; note = 2'-O-methyl modified nucleotide
  modified_base 28: mod_base = OTHER; note = 2'-O-methyl modified nucleotide
  modified_base 29: mod_base = OTHER; note = 2'-O-methyl modified nucleotide
  modified_base 30: mod_base = OTHER; note = 2'-O-methyl modified nucleotide
  modified_base 31: mod_base = OTHER; note = 2'-O-methyl modified nucleotide
  modified_base 32: mod_base = OTHER; note = 2'-O-methyl modified nucleotide
  modified_base 33: mod_base = OTHER; note = 2'-O-methyl modified nucleotide
  misc_difference 34: note = 2'-O-methyl modified nucleotide may be trivalent N-acetylgalactosamine modified
ncaatctgtgttctggcaccagaacacagattga

SEQ ID NO: 1539 - RNA, 34 nt, synthetic construct
  source 1..34: mol_type = other RNA
  misc_difference 1: note = 2'-O-methyl modified nucleotide may be 5' phosphate modified
  modified_base 2: mod_base = OTHER; note = 2'-fluoro modified nucleotide
  modified_base 3: mod_base = OTHER; note = 2'-O-methyl modified nucleotide
  modified_base 4: mod_base = OTHER; note = 2'-O-methyl modified nucleotide
  modified_base 5: mod_base = OTHER; note = 2'-O-methyl modified nucleotide
  modified_base 6: mod_base = OTHER; note = 2'-O-methyl modified nucleotide
  modified_base 7: mod_base = OTHER; note = 2'-O-methyl modified nucleotide
  modified_base 8: mod_base = OTHER; note = 2'-O-methyl modified nucleotide
  modified_base 9: mod_base = OTHER; note = 2'-O-methyl modified nucleotide
  modified_base 10: mod_base = OTHER; note = 2'-O-methyl modified nucleotide
  modified_base 11: mod_base = OTHER; note = 2'-O-methyl modified nucleotide
  modified_base 12: mod_base = OTHER; note = 2'-O-methyl modified nucleotide
  modified_base 13: mod_base = OTHER; note = 2'-O-methyl modified nucleotide
  modified_base 14: mod_base = OTHER; note = 2'-fluoro modified nucleotide
  modified_base 15: mod_base = OTHER; note = 2'-O-methyl modified nucleotide
  modified_base 16: mod_base = OTHER; note = 2'-O-methyl modified nucleotide
  modified_base 17: mod_base = OTHER; note = 2'-O-methyl modified nucleotide
  modified_base 18: mod_base = OTHER; note = 2'-O-methyl modified nucleotide
  modified_base 19: mod_base = OTHER; note = 2'-O-methyl modified nucleotide
  modified_base 20: mod_base = OTHER; note = 2'-O-methyl modified nucleotide
  modified_base 21: mod_base = OTHER; note = 2'-O-methyl modified nucleotide
  modified_base 22: mod_base = OTHER; note = 2'-fluoro modified nucleotide
  modified_base 23: mod_base = OTHER; note = 2'-fluoro modified nucleotide
  modified_base 24: mod_base = OTHER; note = 2'-fluoro modified nucleotide
  modified_base 25: mod_base = OTHER; note = 2'-O-methyl modified nucleotide
  modified_base 26: mod_base = OTHER; note = 2'-O-methyl modified nucleotide
  modified_base 27: mod_base = OTHER; note = 2'-O-methyl modified nucleotide
  modified_base 28: mod_base = OTHER; note = 2'-O-methyl modified nucleotide
  modified_base 29: mod_base = OTHER; note = 2'-O-methyl modified nucleotide
  modified_base 30: mod_base = OTHER; note = 2'-O-methyl modified nucleotide
  modified_base 31: mod_base = OTHER; note = 2'-O-methyl modified nucleotide
  modified_base 32: mod_base = OTHER; note = 2'-O-methyl modified nucleotide
  modified_base 33: mod_base = OTHER; note = 2'-O-methyl modified nucleotide
  misc_difference 34: note = 2'-O-methyl modified nucleotide may be trivalent N-acetylgalactosamine modified
ntgagcttgatcagggcaacctgatcaagctcaa

SEQ ID NO: 1540 - RNA, 34 nt, synthetic construct
  source 1..34: mol_type = other RNA
  misc_difference 1: note = 2'-O-methyl modified nucleotide may be 5' phosphate modified
  modified_base 2: mod_base = OTHER; note = 2'-fluoro modified nucleotide
  modified_base 3: mod_base = OTHER; note = 2'-O-methyl modified nucleotide
  modified_base 4: mod_base = OTHER; note = 2'-O-methyl modified nucleotide
  modified_base 5: mod_base = OTHER; note = 2'-O-methyl modified nucleotide
  modified_base 6: mod_base = OTHER; note = 2'-O-methyl modified nucleotide
  modified_base 7: mod_base = OTHER; note = 2'-O-methyl modified nucleotide
  modified_base 8: mod_base = OTHER; note = 2'-O-methyl modified nucleotide
  modified_base 9: mod_base = OTHER; note = 2'-O-methyl modified nucleotide
  modified_base 10: mod_base = OTHER; note = 2'-O-methyl modified nucleotide
  modified_base 11: mod_base = OTHER; note = 2'-O-methyl modified nucleotide
  modified_base 12: mod_base = OTHER; note = 2'-O-methyl modified nucleotide
  modified_base 13: mod_base = OTHER; note = 2'-O-methyl modified nucleotide
  modified_base 14: mod_base = OTHER; note = 2'-fluoro modified nucleotide
  modified_base 15: mod_base = OTHER; note = 2'-O-methyl modified nucleotide
  modified_base 16: mod_base = OTHER; note = 2'-O-methyl modified nucleotide
  modified_base 17: mod_base = OTHER; note = 2'-O-methyl modified nucleotide
  modified_base 18: mod_base = OTHER; note = 2'-O-methyl modified nucleotide
  modified_base 19: mod_base = OTHER; note = 2'-O-methyl modified nucleotide
  modified_base 20: mod_base = OTHER; note = 2'-O-methyl modified nucleotide
  modified_base 21: mod_base = OTHER; note = 2'-O-methyl modified nucleotide
  modified_base 22: mod_base = OTHER; note = 2'-fluoro modified nucleotide
  modified_base 23: mod_base = OTHER; note = 2'-fluoro modified nucleotide
  modified_base 24: mod_base = OTHER; note = 2'-fluoro modified nucleotide
  modified_base 25: mod_base = OTHER; note = 2'-O-methyl modified nucleotide
  modified_base 26: mod_base = OTHER; note = 2'-O-methyl modified nucleotide
  modified_base 27: mod_base = OTHER; note = 2'-O-methyl modified nucleotide
  modified_base 28: mod_base = OTHER; note = 2'-O-methyl modified nucleotide
  modified_base 29: mod_base = OTHER; note = 2'-O-methyl modified nucleotide
  modified_base 30: mod_base = OTHER; note = 2'-O-methyl modified nucleotide
  modified_base 31: mod_base = OTHER; note = 2'-O-methyl modified nucleotide
  modified_base 32: mod_base = OTHER; note = 2'-O-methyl modified nucleotide
  modified_base 33: mod_base = OTHER; note = 2'-O-methyl modified nucleotide
  misc_difference 34: note = 2'-O-methyl modified nucleotide may be trivalent N-acetylgalactosamine modified
nagtggaaagagatctcatgatctctttccacta

SEQ ID NO: 1541 - RNA, 34 nt, synthetic construct
  source 1..34: mol_type = other RNA
  misc_difference 1: note = 2'-O-methyl modified nucleotide may be 5' phosphate modified
  modified_base 2: mod_base = OTHER; note = 2'-fluoro modified nucleotide
  modified_base 3: mod_base = OTHER; note = 2'-O-methyl modified nucleotide
  modified_base 4: mod_base = OTHER; note = 2'-O-methyl modified nucleotide
  modified_base 5: mod_base = OTHER; note = 2'-O-methyl modified nucleotide
  modified_base 6: mod_base = OTHER; note = 2'-O-methyl modified nucleotide
  modified_base 7: mod_base = OTHER; note = 2'-O-methyl modified nucleotide
  modified_base 8: mod_base = OTHER; note = 2'-O-methyl modified nucleotide
  modified_base 9: mod_base = OTHER; note = 2'-O-methyl modified nucleotide
  modified_base 10: mod_base = OTHER; note = 2'-O-methyl modified nucleotide
  modified_base 11: mod_base = OTHER; note = 2'-O-methyl modified nucleotide
  modified_base 12: mod_base = OTHER; note = 2'-O-methyl modified nucleotide
  modified_base 13: mod_base = OTHER; note = 2'-O-methyl modified nucleotide
  modified_base 14: mod_base = OTHER; note = 2'-fluoro modified nucleotide
  modified_base 15: mod_base = OTHER; note = 2'-O-methyl modified nucleotide
  modified_base 16: mod_base = OTHER; note = 2'-O-methyl modified nucleotide
  modified_base 17: mod_base = OTHER; note = 2'-O-methyl modified nucleotide
  modified_base 18: mod_base = OTHER; note = 2'-O-methyl modified nucleotide
  modified_base 19: mod_base = OTHER; note = 2'-O-methyl modified nucleotide
  modified_base 20: mod_base = OTHER; note = 2'-O-methyl modified nucleotide
  modified_base 21: mod_base = OTHER; note = 2'-O-methyl modified nucleotide
  modified_base 22: mod_base = OTHER; note = 2'-fluoro modified nucleotide
  modified_base 23: mod_base = OTHER; note = 2'-fluoro modified nucleotide
  modified_base 24: mod_base = OTHER; note = 2'-fluoro modified nucleotide
  modified_base 25: mod_base = OTHER; note = 2'-O-methyl modified nucleotide
  modified_base 26: mod_base = OTHER; note = 2'-O-methyl modified nucleotide
  modified_base 27: mod_base = OTHER; note = 2'-O-methyl modified nucleotide
  modified_base 28: mod_base = OTHER; note = 2'-O-methyl modified nucleotide
  modified_base 29: mod_base = OTHER; note = 2'-O-methyl modified nucleotide
  modified_base 30: mod_base = OTHER; note = 2'-O-methyl modified nucleotide
  modified_base 31: mod_base = OTHER; note = 2'-O-methyl modified nucleotide
  modified_base 32: mod_base = OTHER; note = 2'-O-methyl modified nucleotide
  modified_base 33: mod_base = OTHER; note = 2'-O-methyl modified nucleotide
  misc_difference 34: note = 2'-O-methyl modified nucleotide may be trivalent N-acetylgalactosamine modified
nagatgttcatggagcctgctccatgaacatcta

SEQ ID NO: 1542 - RNA, 34 nt, synthetic construct
  source 1..34: mol_type = other RNA
  misc_difference 1: note = 2'-O-methyl modified nucleotide may be 5' phosphate modified
  modified_base 2: mod_base = OTHER; note = 2'-fluoro modified nucleotide
  modified_base 3: mod_base = OTHER; note = 2'-O-methyl modified nucleotide
  modified_base 4: mod_base = OTHER; note = 2'-O-methyl modified nucleotide
  modified_base 5: mod_base = OTHER; note = 2'-O-methyl modified nucleotide
  modified_base 6: mod_base = OTHER; note = 2'-O-methyl modified nucleotide
  modified_base 7: mod_base = OTHER; note = 2'-O-methyl modified nucleotide
  modified_base 8: mod_base = OTHER; note = 2'-O-methyl modified nucleotide
  modified_base 9: mod_base = OTHER; note = 2'-O-methyl modified nucleotide
  modified_base 10: mod_base = OTHER; note = 2'-O-methyl modified nucleotide
  modified_base 11: mod_base = OTHER; note = 2'-O-methyl modified nucleotide
  modified_base 12: mod_base = OTHER; note = 2'-O-methyl modified nucleotide
  modified_base 13: mod_base = OTHER; note = 2'-O-methyl modified nucleotide
  modified_base 14: mod_base = OTHER; note = 2'-fluoro modified nucleotide
  modified_base 15: mod_base = OTHER; note = 2'-O-methyl modified nucleotide
  modified_base 16: mod_base = OTHER; note = 2'-O-methyl modified nucleotide
  modified_base 17: mod_base = OTHER; note = 2'-O-methyl modified nucleotide
  modified_base 18: mod_base = OTHER; note = 2'-O-methyl modified nucleotide
  modified_base 19: mod_base = OTHER; note = 2'-O-methyl modified nucleotide
  modified_base 20: mod_base = OTHER; note = 2'-O-methyl modified nucleotide
  modified_base 21: mod_base = OTHER; note = 2'-O-methyl modified nucleotide
  modified_base 22: mod_base = OTHER; note = 2'-fluoro modified nucleotide
  modified_base 23: mod_base = OTHER; note = 2'-fluoro modified nucleotide
  modified_base 24: mod_base = OTHER; note = 2'-fluoro modified nucleotide
  modified_base 25: mod_base = OTHER; note = 2'-O-methyl modified nucleotide
  modified_base 26: mod_base = OTHER; note = 2'-O-methyl modified nucleotide
  modified_base 27: mod_base = OTHER; note = 2'-O-methyl modified nucleotide
  modified_base 28: mod_base = OTHER; note = 2'-O-methyl modified nucleotide
  modified_base 29: mod_base = OTHER; note = 2'-O-methyl modified nucleotide
  modified_base 30: mod_base = OTHER; note = 2'-O-methyl modified nucleotide
  modified_base 31: mod_base = OTHER; note = 2'-O-methyl modified nucleotide
  modified_base 32: mod_base = OTHER; note = 2'-O-methyl modified nucleotide
  modified_base 33: mod_base = OTHER; note = 2'-O-methyl modified nucleotide
  misc_difference 34: note = 2'-O-methyl modified nucleotide may be trivalent N-acetylgalactosamine modified
ngcaagtggtagttggaggcaactaccacttgca

SEQ ID NO: 1543 - RNA, 34 nt, synthetic construct
  source 1..34: mol_type = other RNA
  misc_difference 1: note = 2'-O-methyl modified nucleotide may be 5' phosphate modified
  modified_base 2: mod_base = OTHER; note = 2'-fluoro modified nucleotide
  modified_base 3: mod_base = OTHER; note = 2'-O-methyl modified nucleotide
  modified_base 4: mod_base = OTHER; note = 2'-O-methyl modified nucleotide
  modified_base 5: mod_base = OTHER; note = 2'-O-methyl modified nucleotide
  modified_base 6: mod_base = OTHER; note = 2'-O-methyl modified nucleotide
  modified_base 7: mod_base = OTHER; note = 2'-O-methyl modified nucleotide
  modified_base 8: mod_base = OTHER; note = 2'-O-methyl modified nucleotide
  modified_base 9: mod_base = OTHER; note = 2'-O-methyl modified nucleotide
  modified_base 10: mod_base = OTHER; note = 2'-O-methyl modified nucleotide
  modified_base 11: mod_base = OTHER; note = 2'-O-methyl modified nucleotide
  modified_base 12: mod_base = OTHER; note = 2'-O-methyl modified nucleotide
  modified_base 13: mod_base = OTHER; note = 2'-O-methyl modified nucleotide
  modified_base 14: mod_base = OTHER; note = 2'-fluoro modified nucleotide
  modified_base 15: mod_base = OTHER; note = 2'-O-methyl modified nucleotide
  modified_base 16: mod_base = OTHER; note = 2'-O-methyl modified nucleotide
  modified_base 17: mod_base = OTHER; note = 2'-O-methyl modified nucleotide
  modified_base 18: mod_base = OTHER; note = 2'-O-methyl modified nucleotide
  modified_base 19: mod_base = OTHER; note = 2'-O-methyl modified nucleotide
  modified_base 20: mod_base = OTHER; note = 2'-O-methyl modified nucleotide
  modified_base 21: mod_base = OTHER; note = 2'-O-methyl modified nucleotide
  modified_base 22: mod_base = OTHER; note = 2'-fluoro modified nucleotide
  modified_base 23: mod_base = OTHER; note = 2'-fluoro modified nucleotide
  modified_base 24: mod_base = OTHER; note = 2'-fluoro modified nucleotide
  modified_base 25: mod_base = OTHER; note = 2'-O-methyl modified nucleotide
  modified_base 26: mod_base = OTHER; note = 2'-O-methyl modified nucleotide
  modified_base 27: mod_base = OTHER; note = 2'-O-methyl modified nucleotide
  modified_base 28: mod_base = OTHER; note = 2'-O-methyl modified nucleotide
  modified_base 29: mod_base = OTHER; note = 2'-O-methyl modified nucleotide
  modified_base 30: mod_base = OTHER; note = 2'-O-methyl modified nucleotide
  modified_base 31: mod_base = OTHER; note = 2'-O-methyl modified nucleotide
  modified_base 32: mod_base = OTHER; note = 2'-O-methyl modified nucleotide
  modified_base 33: mod_base = OTHER; note = 2'-O-methyl modified nucleotide
  misc_difference 34: note = 2'-O-methyl modified nucleotide may be trivalent N-acetylgalactosamine modified
ncacaccataacttgccaccaagttatggtgtga

SEQ ID NO: 1544 - RNA, 34 nt, synthetic construct
  source 1..34: mol_type = other RNA
  misc_difference 1: note = 2'-O-methyl modified nucleotide may be 5' phosphate modified
  modified_base 2: mod_base = OTHER; note = 2'-fluoro modified nucleotide
  modified_base 3: mod_base = OTHER; note = 2'-O-methyl modified nucleotide
  modified_base 4: mod_base = OTHER; note = 2'-O-methyl modified nucleotide
  modified_base 5: mod_base = OTHER; note = 2'-O-methyl modified nucleotide
  modified_base 6: mod_base = OTHER; note = 2'-O-methyl modified nucleotide
  modified_base 7: mod_base = OTHER; note = 2'-O-methyl modified nucleotide
  modified_base 8: mod_base = OTHER; note = 2'-O-methyl modified nucleotide
  modified_base 9: mod_base = OTHER; note = 2'-O-methyl modified nucleotide
  modified_base 10: mod_base = OTHER; note = 2'-O-methyl modified nucleotide
  modified_base 11: mod_base = OTHER; note = 2'-O-methyl modified nucleotide
  modified_base 12: mod_base = OTHER; note = 2'-O-methyl modified nucleotide
  modified_base 13: mod_base = OTHER; note = 2'-O-methyl modified nucleotide
  modified_base 14: mod_base = OTHER; note = 2'-fluoro modified nucleotide
  modified_base 15: mod_base = OTHER; note = 2'-O-methyl modified nucleotide
  modified_base 16: mod_base = OTHER; note = 2'-O-methyl modified nucleotide
  modified_base 17: mod_base = OTHER; note = 2'-O-methyl modified nucleotide
  modified_base 18: mod_base = OTHER; note = 2'-O-methyl modified nucleotide
  modified_base 19: mod_base = OTHER; note = 2'-O-methyl modified nucleotide
  modified_base 20: mod_base = OTHER; note = 2'-O-methyl modified nucleotide
  modified_base 21: mod_base = OTHER; note = 2'-O-methyl modified nucleotide
  modified_base 22: mod_base = OTHER; note = 2'-fluoro modified nucleotide
  modified_base 23: mod_base = OTHER; note = 2'-fluoro modified nucleotide
  modified_base 24: mod_base = OTHER; note = 2'-fluoro modified nucleotide
  modified_base 25: mod_base = OTHER; note = 2'-O-methyl modified nucleotide
  modified_base 26: mod_base = OTHER; note = 2'-O-methyl modified nucleotide
  modified_base 27: mod_base = OTHER; note = 2'-O-methyl modified nucleotide
  modified_base 28: mod_base = OTHER; note = 2'-O-methyl modified nucleotide
  modified_base 29: mod_base = OTHER; note = 2'-O-methyl modified nucleotide
  modified_base 30: mod_base = OTHER; note = 2'-O-methyl modified nucleotide
  modified_base 31: mod_base = OTHER; note = 2'-O-methyl modified nucleotide
  modified_base 32: mod_base = OTHER; note = 2'-O-methyl modified nucleotide
  modified_base 33: mod_base = OTHER; note = 2'-O-methyl modified nucleotide
  misc_difference 34: note = 2'-O-methyl modified nucleotide may be trivalent N-acetylgalactosamine modified
naaagagatctcatcactcgatgagatctcttta

SEQ ID NO: 1545 - RNA, 34 nt, synthetic construct
  source 1..34: mol_type = other RNA
  misc_difference 1: note = 2'-O-methyl modified nucleotide may be 5' phosphate modified
  modified_base 2: mod_base = OTHER; note = 2'-fluoro modified nucleotide
  modified_base 3: mod_base = OTHER; note = 2'-O-methyl modified nucleotide
  modified_base 4: mod_base = OTHER; note = 2'-O-methyl modified nucleotide
  modified_base 5: mod_base = OTHER; note = 2'-O-methyl modified nucleotide
  modified_base 6: mod_base = OTHER; note = 2'-O-methyl modified nucleotide
  modified_base 7: mod_base = OTHER; note = 2'-O-methyl modified nucleotide
  modified_base 8: mod_base = OTHER; note = 2'-O-methyl modified nucleotide
  modified_base 9: mod_base = OTHER; note = 2'-O-methyl modified nucleotide
  modified_base 10: mod_base = OTHER; note = 2'-O-methyl modified nucleotide
  modified_base 11: mod_base = OTHER; note = 2'-O-methyl modified nucleotide
  modified_base 12: mod_base = OTHER; note = 2'-O-methyl modified nucleotide
  modified_base 13: mod_base = OTHER; note = 2'-O-methyl modified nucleotide
  modified_base 14: mod_base = OTHER; note = 2'-fluoro modified nucleotide
  modified_base 15: mod_base = OTHER; note = 2'-O-methyl modified nucleotide
  modified_base 16: mod_base = OTHER; note = 2'-O-methyl modified nucleotide
  modified_base 17: mod_base = OTHER; note = 2'-O-methyl modified nucleotide
  modified_base 18: mod_base = OTHER; note = 2'-O-methyl modified nucleotide
  modified_base 19: mod_base = OTHER; note = 2'-O-methyl modified nucleotide
  modified_base 20: mod_base = OTHER; note = 2'-O-methyl modified nucleotide
  modified_base 21: mod_base = OTHER; note = 2'-O-methyl modified nucleotide
  modified_base 22: mod_base = OTHER; note = 2'-fluoro modified nucleotide
  modified_base 23: mod_base = OTHER; note = 2'-fluoro modified nucleotide
  modified_base 24: mod_base = OTHER; note = 2'-fluoro modified nucleotide
  modified_base 25: mod_base = OTHER; note = 2'-O-methyl modified nucleotide
  modified_base 26: mod_base = OTHER; note = 2'-O-methyl modified nucleotide
  modified_base 27: mod_base = OTHER; note = 2'-O-methyl modified nucleotide
  modified_base 28: mod_base = OTHER; note = 2'-O-methyl modified nucleotide
  modified_base 29: mod_base = OTHER; note = 2'-O-methyl modified nucleotide
  modified_base 30: mod_base = OTHER; note = 2'-O-methyl modified nucleotide
  modified_base 31: mod_base = OTHER; note = 2'-O-methyl modified nucleotide
  modified_base 32: mod_base = OTHER; note = 2'-O-methyl modified nucleotide
  modified_base 33: mod_base = OTHER; note = 2'-O-methyl modified nucleotide
  misc_difference 34: note = 2'-O-methyl modified nucleotide may be trivalent N-acetylgalactosamine modified
ntcaacttgtggtcttcatagaccacaagttgaa

SEQ ID NO: 1546 - RNA, 34 nt, synthetic construct
  source 1..34: mol_type = other RNA
  misc_difference 1: note = 2'-O-methyl modified nucleotide may be 5' phosphate modified
  modified_base 2: mod_base = OTHER; note = 2'-fluoro modified nucleotide
  modified_base 3: mod_base = OTHER; note = 2'-O-methyl modified nucleotide
  modified_base 4: mod_base = OTHER; note = 2'-O-methyl modified nucleotide
  modified_base 5: mod_base = OTHER; note = 2'-O-methyl modified nucleotide
  modified_base 6: mod_base = OTHER; note = 2'-O-methyl modified nucleotide
  modified_base 7: mod_base = OTHER; note = 2'-O-methyl modified nucleotide
  modified_base 8: mod_base = OTHER; note = 2'-O-methyl modified nucleotide
  modified_base 9: mod_base = OTHER; note = 2'-O-methyl modified nucleotide
  modified_base 10: mod_base = OTHER; note = 2'-O-methyl modified nucleotide
  modified_base 11: mod_base = OTHER; note = 2'-O-methyl modified nucleotide
  modified_base 12: mod_base = OTHER; note = 2'-O-methyl modified nucleotide
  modified_base 13: mod_base = OTHER; note = 2'-O-methyl modified nucleotide
  modified_base 14: mod_base = OTHER; note = 2'-fluoro modified nucleotide
  modified_base 15: mod_base = OTHER; note = 2'-O-methyl modified nucleotide
  modified_base 16: mod_base = OTHER; note = 2'-O-methyl modified nucleotide
  modified_base 17: mod_base = OTHER; note = 2'-O-methyl modified nucleotide
  modified_base 18: mod_base = OTHER; note = 2'-O-methyl modified nucleotide
  modified_base 19: mod_base = OTHER; note = 2'-O-methyl modified nucleotide
  modified_base 20: mod_base = OTHER; note = 2'-O-methyl modified nucleotide
  modified_base 21: mod_base = OTHER; note = 2'-O-methyl modified nucleotide
  modified_base 22: mod_base = OTHER; note = 2'-fluoro modified nucleotide
  modified_base 23: mod_base = OTHER; note = 2'-fluoro modified nucleotide
  modified_base 24: mod_base = OTHER; note = 2'-fluoro modified nucleotide
  modified_base 25: mod_base = OTHER; note = 2'-O-methyl modified nucleotide
  modified_base 26: mod_base = OTHER; note = 2'-O-methyl modified nucleotide
  modified_base 27: mod_base = OTHER; note = 2'-O-methyl modified nucleotide
  modified_base 28: mod_base = OTHER; note = 2'-O-methyl modified nucleotide
  modified_base 29: mod_base = OTHER; note = 2'-O-methyl modified nucleotide
  modified_base 30: mod_base = OTHER; note = 2'-O-methyl modified nucleotide
  modified_base 31: mod_base = OTHER; note = 2'-O-methyl modified nucleotide
  modified_base 32: mod_base = OTHER; note = 2'-O-methyl modified nucleotide
  modified_base 33: mod_base = OTHER; note = 2'-O-methyl modified nucleotide
  misc_difference 34: note = 2'-O-methyl modified nucleotide may be trivalent N-acetylgalactosamine modified
naaacgacttctcttgtgaaagagaagtcgttta

SEQ ID NO: 1547 - RNA, 34 nt, synthetic construct
  source 1..34: mol_type = other RNA
  misc_difference 1: note = 2'-O-methyl modified nucleotide may be 5' phosphate modified
  modified_base 2: mod_base = OTHER; note = 2'-fluoro modified nucleotide
  modified_base 3: mod_base = OTHER; note = 2'-O-methyl modified nucleotide
  modified_base 4: mod_base = OTHER; note = 2'-O-methyl modified nucleotide
  modified_base 5: mod_base = OTHER; note = 2'-O-methyl modified nucleotide
  modified_base 6: mod_base = OTHER; note = 2'-O-methyl modified nucleotide
  modified_base 7: mod_base = OTHER; note = 2'-O-methyl modified nucleotide
  modified_base 8: mod_base = OTHER; note = 2'-O-methyl modified nucleotide
  modified_base 9: mod_base = OTHER; note = 2'-O-methyl modified nucleotide
  modified_base 10: mod_base = OTHER; note = 2'-O-methyl modified nucleotide
  modified_base 11: mod_base = OTHER; note = 2'-O-methyl modified nucleotide
  modified_base 12: mod_base = OTHER; note = 2'-O-methyl modified nucleotide
  modified_base 13: mod_base = OTHER; note = 2'-O-methyl modified nucleotide
  modified_base 14: mod_base = OTHER; note = 2'-fluoro modified nucleotide
  modified_base 15: mod_base = OTHER; note = 2'-O-methyl modified nucleotide
  modified_base 16: mod_base = OTHER; note = 2'-O-methyl modified nucleotide
  modified_base 17: mod_base = OTHER; note = 2'-O-methyl modified nucleotide
  modified_base 18: mod_base = OTHER; note = 2'-O-methyl modified nucleotide
  modified_base 19: mod_base = OTHER; note = 2'-O-methyl modified nucleotide
  modified_base 20: mod_base = OTHER; note = 2'-O-methyl modified nucleotide
  modified_base 21: mod_base = OTHER; note = 2'-O-methyl modified nucleotide
  modified_base 22: mod_base = OTHER; note = 2'-fluoro modified nucleotide
  modified_base 23: mod_base = OTHER; note = 2'-fluoro modified nucleotide
  modified_base 24: mod_base = OTHER; note = 2'-fluoro modified nucleotide
  modified_base 25: mod_base = OTHER; note = 2'-O-methyl modified nucleotide
  modified_base 26: mod_base = OTHER; note = 2'-O-methyl modified nucleotide
  modified_base 27: mod_base = OTHER; note = 2'-O-methyl modified nucleotide
  modified_base 28: mod_base = OTHER; note = 2'-O-methyl modified nucleotide
  modified_base 29: mod_base = OTHER; note = 2'-O-methyl modified nucleotide
  modified_base 30: mod_base = OTHER; note = 2'-O-methyl modified nucleotide
  modified_base 31: mod_base = OTHER; note = 2'-O-methyl modified nucleotide
  modified_base 32: mod_base = OTHER; note = 2'-O-methyl modified nucleotide
  modified_base 33: mod_base = OTHER; note = 2'-O-methyl modified nucleotide
  misc_difference 34: note = 2'-O-methyl modified nucleotide may be trivalent N-acetylgalactosamine modified
ngtatgtggcatatgtcaccatatgccacataca

SEQ ID NO: 1548 - RNA, 34 nt, synthetic construct
  source 1..34: mol_type = other RNA
  misc_difference 1: note = 2'-O-methyl modified nucleotide may be 5' phosphate modified
  modified_base 2: mod_base = OTHER; note = 2'-fluoro modified nucleotide
  modified_base 3: mod_base = OTHER; note = 2'-O-methyl modified nucleotide
  modified_base 4: mod_base = OTHER; note = 2'-O-methyl modified nucleotide
  modified_base 5: mod_base = OTHER; note = 2'-O-methyl modified nucleotide
  modified_base 6: mod_base = OTHER; note = 2'-O-methyl modified nucleotide
  modified_base 7: mod_base = OTHER; note = 2'-O-methyl modified nucleotide
  modified_base 8: mod_base = OTHER; note = 2'-O-methyl modified nucleotide
  modified_base 9: mod_base = OTHER; note = 2'-O-methyl modified nucleotide
  modified_base 10: mod_base = OTHER; note = 2'-O-methyl modified nucleotide
  modified_base 11: mod_base = OTHER; note = 2'-O-methyl modified nucleotide
  modified_base 12: mod_base = OTHER; note = 2'-O-methyl modified nucleotide
  modified_base 13: mod_base = OTHER; note = 2'-O-methyl modified nucleotide
  modified_base 14: mod_base = OTHER; note = 2'-fluoro modified nucleotide
  modified_base 15: mod_base = OTHER; note = 2'-O-methyl modified nucleotide
  modified_base 16: mod_base = OTHER; note = 2'-O-methyl modified nucleotide
  modified_base 17: mod_base = OTHER; note = 2'-O-methyl modified nucleotide
  modified_base 18: mod_base = OTHER; note = 2'-O-methyl modified nucleotide
  modified_base 19: mod_base = OTHER; note = 2'-O-methyl modified nucleotide
  modified_base 20: mod_base = OTHER; note = 2'-O-methyl modified nucleotide
  modified_base 21: mod_base = OTHER; note = 2'-O-methyl modified nucleotide
  modified_base 22: mod_base = OTHER; note = 2'-fluoro modified nucleotide
  modified_base 23: mod_base = OTHER; note = 2'-fluoro modified nucleotide
  modified_base 24: mod_base = OTHER; note = 2'-fluoro modified nucleotide
  modified_base 25: mod_base = OTHER; note = 2'-O-methyl modified nucleotide
  modified_base 26: mod_base = OTHER; note = 2'-O-methyl modified nucleotide
  modified_base 27: mod_base = OTHER; note = 2'-O-methyl modified nucleotide
  modified_base 28: mod_base = OTHER; note = 2'-O-methyl modified nucleotide
  modified_base 29: mod_base = OTHER; note = 2'-O-methyl modified nucleotide
  modified_base 30: mod_base = OTHER; note = 2'-O-methyl modified nucleotide
  modified_base 31: mod_base = OTHER; note = 2'-O-methyl modified nucleotide
  modified_base 32: mod_base = OTHER; note = 2'-O-methyl modified nucleotide
  modified_base 33: mod_base = OTHER; note = 2'-O-methyl modified nucleotide
  misc_difference 34: note = 2'-O-methyl modified nucleotide may be trivalent N-acetylgalactosamine modified
ngtctttcttggaagccaacttccaagaaagaca

SEQ ID NO: 1549 - RNA, 34 nt, synthetic construct
  source 1..34: mol_type = other RNA
  misc_difference 1: note = 2'-O-methyl modified nucleotide may be 5' phosphate modified
  modified_base 2: mod_base = OTHER; note = 2'-fluoro modified nucleotide
  modified_base 3: mod_base = OTHER; note = 2'-O-methyl modified nucleotide
  modified_base 4: mod_base = OTHER; note = 2'-O-methyl modified nucleotide
  modified_base 5: mod_base = OTHER; note = 2'-O-methyl modified nucleotide
  modified_base 6: mod_base = OTHER; note = 2'-O-methyl modified nucleotide
  modified_base 7: mod_base = OTHER; note = 2'-O-methyl modified nucleotide
  modified_base 8: mod_base = OTHER; note = 2'-O-methyl modified nucleotide
  modified_base 9: mod_base = OTHER; note = 2'-O-methyl modified nucleotide
  modified_base 10: mod_base = OTHER; note = 2'-O-methyl modified nucleotide
  modified_base 11: mod_base = OTHER; note = 2'-O-methyl modified nucleotide
  modified_base 12: mod_base = OTHER; note = 2'-O-methyl modified nucleotide
  modified_base 13: mod_base = OTHER; note = 2'-O-methyl modified nucleotide
  modified_base 14: mod_base = OTHER; note = 2'-fluoro modified nucleotide
  modified_base 15: mod_base = OTHER; note = 2'-O-methyl modified nucleotide
  modified_base 16: mod_base = OTHER; note = 2'-O-methyl modified nucleotide
  modified_base 17: mod_base = OTHER; note = 2'-O-methyl modified nucleotide
  modified_base 18: mod_base = OTHER; note = 2'-O-methyl modified nucleotide
  modified_base 19: mod_base = OTHER; note = 2'-O-methyl modified nucleotide
  modified_base 20: mod_base = OTHER; note = 2'-O-methyl modified nucleotide
  modified_base 21: mod_base = OTHER; note = 2'-O-methyl modified nucleotide
  modified_base 22: mod_base = OTHER; note = 2'-fluoro modified nucleotide
  modified_base 23: mod_base = OTHER; note = 2'-fluoro modified nucleotide
  modified_base 24: mod_base = OTHER; note = 2'-fluoro modified nucleotide
  modified_base 25: mod_base = OTHER; note = 2'-O-methyl modified nucleotide
  modified_base 26: mod_base = OTHER; note = 2'-O-methyl modified nucleotide
  modified_base 27: mod_base = OTHER; note = 2'-O-methyl modified nucleotide
  modified_base 28: mod_base = OTHER; note = 2'-O-methyl modified nucleotide
  modified_base 29: mod_base = OTHER; note = 2'-O-methyl modified nucleotide
  modified_base 30: mod_base = OTHER; note = 2'-O-methyl modified nucleotide
  modified_base 31: mod_base = OTHER; note = 2'-O-methyl modified nucleotide
  modified_base 32: mod_base = OTHER; note = 2'-O-methyl modified nucleotide
  modified_base 33: mod_base = OTHER; note = 2'-O-methyl modified nucleotide
  misc_difference 34: note = 2'-O-methyl modified nucleotide may be trivalent N-acetylgalactosamine modified
ncatccagataatcctcccggattatctggatga

SEQ ID NO: 1550 - RNA, 34 nt, synthetic construct
  source 1..34: mol_type = other RNA
  misc_difference 1: note = 2'-O-methyl modified nucleotide may be 5' phosphate modified
  modified_base 2: mod_base = OTHER; note = 2'-fluoro modified nucleotide
  modified_base 3: mod_base = OTHER; note = 2'-O-methyl modified nucleotide
  modified_base 4: mod_base = OTHER; note = 2'-O-methyl modified nucleotide
  modified_base 5: mod_base = OTHER; note = 2'-O-methyl modified nucleotide
  modified_base 6: mod_base = OTHER; note = 2'-O-methyl modified nucleotide
  modified_base 7: mod_base = OTHER; note = 2'-O-methyl modified nucleotide
  modified_base 8: mod_base = OTHER; note = 2'-O-methyl modified nucleotide
  modified_base 9: mod_base = OTHER; note = 2'-O-methyl modified nucleotide
  modified_base 10: mod_base = OTHER; note = 2'-O-methyl modified nucleotide
  modified_base 11: mod_base = OTHER; note = 2'-O-methyl modified nucleotide
  modified_base 12: mod_base = OTHER; note = 2'-O-methyl modified nucleotide
  modified_base 13: mod_base = OTHER; note = 2'-O-methyl modified nucleotide
  modified_base 14: mod_base = OTHER; note = 2'-fluoro modified nucleotide
  modified_base 15: mod_base = OTHER; note = 2'-O-methyl modified nucleotide
  modified_base 16: mod_base = OTHER; note = 2'-O-methyl modified nucleotide
  modified_base 17: mod_base = OTHER; note = 2'-O-methyl modified nucleotide
  modified_base 18: mod_base = OTHER; note = 2'-O-methyl modified nucleotide
  modified_base 19: mod_base = OTHER; note = 2'-O-methyl modified nucleotide
  modified_base 20: mod_base = OTHER; note = 2'-O-methyl modified nucleotide
  modified_base 21: mod_base = OTHER; note = 2'-O-methyl modified nucleotide
  modified_base 22: mod_base = OTHER; note = 2'-fluoro modified nucleotide
  modified_base 23: mod_base = OTHER; note = 2'-fluoro modified nucleotide
  modified_base 24: mod_base = OTHER; note = 2'-fluoro modified nucleotide
  modified_base 25: mod_base = OTHER; note = 2'-O-methyl modified nucleotide
  modified_base 26: mod_base = OTHER; note = 2'-O-methyl modified nucleotide
  modified_base 27: mod_base = OTHER; note = 2'-O-methyl modified nucleotide
  modified_base 28: mod_base = OTHER; note = 2'-O-methyl modified nucleotide
  modified_base 29: mod_base = OTHER; note = 2'-O-methyl modified nucleotide
  modified_base 30: mod_base = OTHER; note = 2'-O-methyl modified nucleotide
  modified_base 31: mod_base = OTHER; note = 2'-O-methyl modified nucleotide
  modified_base 32: mod_base = OTHER; note = 2'-O-methyl modified nucleotide
  modified_base 33: mod_base = OTHER; note = 2'-O-methyl modified nucleotide
  misc_difference 34: note = 2'-O-methyl modified nucleotide may be trivalent N-acetylgalactosamine modified
nttgactttgtcatagccttatgacaaagtcaaa

SEQ ID NO: 1551 - RNA, 34 nt, synthetic construct
  source 1..34: mol_type = other RNA
  misc_difference 1: note = 2'-O-methyl modified nucleotide may be 5' phosphate modified
  modified_base 2: mod_base = OTHER; note = 2'-fluoro modified nucleotide
  modified_base 3: mod_base = OTHER; note = 2'-O-methyl modified nucleotide
  modified_base 4: mod_base = OTHER; note = 2'-O-methyl modified nucleotide
  modified_base 5: mod_base = OTHER; note = 2'-O-methyl modified nucleotide
  modified_base 6: mod_base = OTHER; note = 2'-O-methyl modified nucleotide
  modified_base 7: mod_base = OTHER; note = 2'-O-methyl modified nucleotide
  modified_base 8: mod_base = OTHER; note = 2'-O-methyl modified nucleotide
  modified_base 9: mod_base = OTHER; note = 2'-O-methyl modified nucleotide
  modified_base 10: mod_base = OTHER; note = 2'-O-methyl modified nucleotide
  modified_base 11: mod_base = OTHER; note = 2'-O-methyl modified nucleotide
  modified_base 12: mod_base = OTHER; note = 2'-O-methyl modified nucleotide
  modified_base 13: mod_base = OTHER; note = 2'-O-methyl modified nucleotide
  modified_base 14: mod_base = OTHER; note = 2'-fluoro modified nucleotide
  modified_base 15: mod_base = OTHER; note = 2'-O-methyl modified nucleotide
  modified_base 16: mod_base = OTHER; note = 2'-O-methyl modified nucleotide
  modified_base 17: mod_base = OTHER; note = 2'-O-methyl modified nucleotide
  modified_base 18: mod_base = OTHER; note = 2'-O-methyl modified nucleotide
  modified_base 19: mod_base = OTHER; note = 2'-O-methyl modified nucleotide
  modified_base 20: mod_base = OTHER; note = 2'-O-methyl modified nucleotide
  modified_base 21: mod_base = OTHER; note = 2'-O-methyl modified nucleotide
  modified_base 22: mod_base = OTHER; note = 2'-fluoro modified nucleotide
  modified_base 23: mod_base = OTHER; note = 2'-fluoro modified nucleotide
  modified_base 24: mod_base = OTHER; note = 2'-fluoro modified nucleotide
  modified_base 25: mod_base = OTHER; note = 2'-O-methyl modified nucleotide
  modified_base 26: mod_base = OTHER; note = 2'-O-methyl modified nucleotide
  modified_base 27: mod_base = OTHER; note = 2'-O-methyl modified nucleotide
  modified_base 28: mod_base = OTHER; note = 2'-O-methyl modified nucleotide
  modified_base 29: mod_base = OTHER; note = 2'-O-methyl modified nucleotide
  modified_base 30: mod_base = OTHER; note = 2'-O-methyl modified nucleotide
  modified_base 31: mod_base = OTHER; note = 2'-O-methyl modified nucleotide
  modified_base 32: mod_base = OTHER; note = 2'-O-methyl modified nucleotide
  modified_base 33: mod_base = OTHER; note = 2'-O-methyl modified nucleotide
  misc_difference 34: note = 2'-O-methyl modified nucleotide may be trivalent N-acetylgalactosamine modified
naaactccagacctagacctaggtctggagttta

SEQ ID NO: 1552 - RNA, 34 nt, synthetic construct
  source 1..34: mol_type = other RNA
  misc_difference 1: note = 2'-O-methyl modified nucleotide may be 5' phosphate modified
  modified_base 2: mod_base = OTHER; note = 2'-fluoro modified nucleotide
  modified_base 3: mod_base = OTHER; note = 2'-O-methyl modified nucleotide
  modified_base 4: mod_base = OTHER; note = 2'-O-methyl modified nucleotide
  modified_base 5: mod_base = OTHER; note = 2'-O-methyl modified nucleotide
  modified_base 6: mod_base = OTHER; note = 2'-O-methyl modified nucleotide
  modified_base 7: mod_base = OTHER; note = 2'-O-methyl modified nucleotide
  modified_base 8: mod_base = OTHER; note = 2'-O-methyl modified nucleotide
  modified_base 9: mod_base = OTHER; note = 2'-O-methyl modified nucleotide
  modified_base 10: mod_base = OTHER; note = 2'-O-methyl modified nucleotide
  modified_base 11: mod_base = OTHER; note = 2'-O-methyl modified nucleotide
  modified_base 12: mod_base = OTHER; note = 2'-O-methyl modified nucleotide
  modified_base 13: mod_base = OTHER; note = 2'-O-methyl modified nucleotide
  modified_base 14: mod_base = OTHER; note = 2'-fluoro modified nucleotide
  modified_base 15: mod_base = OTHER; note = 2'-O-methyl modified nucleotide
  modified_base 16: mod_base = OTHER; note = 2'-O-methyl modified nucleotide
  modified_base 17: mod_base = OTHER; note = 2'-O-methyl modified nucleotide
  modified_base 18: mod_base = OTHER; note = 2'-O-methyl modified nucleotide
  modified_base 19: mod_base = OTHER; note = 2'-O-methyl modified nucleotide
  modified_base 20: mod_base = OTHER; note = 2'-O-methyl modified nucleotide
  modified_base 21: mod_base = OTHER; note = 2'-O-methyl modified nucleotide
  modified_base 22: mod_base = OTHER; note = 2'-fluoro modified nucleotide
  modified_base 23: mod_base = OTHER; note = 2'-fluoro modified nucleotide
  modified_base 24: mod_base = OTHER; note = 2'-fluoro modified nucleotide
  modified_base 25: mod_base = OTHER; note = 2'-O-methyl modified nucleotide
  modified_base 26: mod_base = OTHER; note = 2'-O-methyl modified nucleotide
  modified_base 27: mod_base = OTHER; note = 2'-O-methyl modified nucleotide
  modified_base 28: mod_base = OTHER; note = 2'-O-methyl modified nucleotide
  modified_base 29: mod_base = OTHER; note = 2'-O-methyl modified nucleotide
  modified_base 30: mod_base = OTHER; note = 2'-O-methyl modified nucleotide
  modified_base 31: mod_base = OTHER; note = 2'-O-methyl modified nucleotide
  modified_base 32: mod_base = OTHER; note = 2'-O-methyl modified nucleotide
  modified_base 33: mod_base = OTHER; note = 2'-O-methyl modified nucleotide
  misc_difference 34: note = 2'-O-methyl modified nucleotide may be trivalent N-acetylgalactosamine modified
nataacttgccaccttctcaggtggcaagttata

SEQ ID NO: 1553 - RNA, 34 nt, synthetic construct
  source 1..34: mol_type = other RNA
  misc_difference 1: note = 2'-O-methyl modified nucleotide may be 5' phosphate modified
  modified_base 2: mod_base = OTHER; note = 2'-fluoro modified nucleotide
  modified_base 3: mod_base = OTHER; note = 2'-O-methyl modified nucleotide
  modified_base 4: mod_base = OTHER; note = 2'-O-methyl modified nucleotide
  modified_base 5: mod_base = OTHER; note = 2'-O-methyl modified nucleotide
  modified_base 6: mod_base = OTHER; note = 2'-O-methyl modified nucleotide
  modified_base 7: mod_base = OTHER; note = 2'-O-methyl modified nucleotide
  modified_base 8: mod_base = OTHER; note = 2'-O-methyl modified nucleotide
  modified_base 9: mod_base = OTHER; note = 2'-O-methyl modified nucleotide
  modified_base 10: mod_base = OTHER; note = 2'-O-methyl modified nucleotide
  modified_base 11: mod_base = OTHER; note = 2'-O-methyl modified nucleotide
  modified_base 12: mod_base = OTHER; note = 2'-O-methyl modified nucleotide
  modified_base 13: mod_base = OTHER; note = 2'-O-methyl modified nucleotide
  modified_base 14: mod_base = OTHER; note = 2'-fluoro modified nucleotide
  modified_base 15: mod_base = OTHER; note = 2'-O-methyl modified nucleotide
  modified_base 16: mod_base = OTHER; note = 2'-O-methyl modified nucleotide
  modified_base 17: mod_base = OTHER; note = 2'-O-methyl modified nucleotide
  modified_base 18: mod_base = OTHER; note = 2'-O-methyl modified nucleotide
  modified_base 19: mod_base = OTHER; note = 2'-O-methyl modified nucleotide
  modified_base 20: mod_base = OTHER; note = 2'-O-methyl modified nucleotide
  modified_base 21: mod_base = OTHER; note = 2'-O-methyl modified nucleotide
  modified_base 22: mod_base = OTHER; note = 2'-fluoro modified nucleotide
  modified_base 23: mod_base = OTHER; note = 2'-fluoro modified nucleotide
  modified_base 24: mod_base = OTHER; note = 2'-fluoro modified nucleotide
  modified_base 25: mod_base = OTHER; note = 2'-O-methyl modified nucleotide
  modified_base 26: mod_base = OTHER; note = 2'-O-methyl modified nucleotide
  modified_base 27: mod_base = OTHER; note = 2'-O-methyl modified nucleotide
  modified_base 28: mod_base = OTHER; note = 2'-O-methyl modified nucleotide
  modified_base 29: mod_base = OTHER; note = 2'-O-methyl modified nucleotide
  modified_base 30: mod_base = OTHER; note = 2'-O-methyl modified nucleotide
  modified_base 31: mod_base = OTHER; note = 2'-O-methyl modified nucleotide
  modified_base 32: mod_base = OTHER; note = 2'-O-methyl modified nucleotide
  modified_base 33: mod_base = OTHER; note = 2'-O-methyl modified nucleotide
  misc_difference 34: note = 2'-O-methyl modified nucleotide may be trivalent N-acetylgalactosamine modified
ncatagtcataaaattcagattttatgactatga

SEQ ID NO: 1554 - RNA, 34 nt, synthetic construct
  source 1..34: mol_type = other RNA
  misc_difference 1: note = 2'-O-methyl modified nucleotide may be 5' phosphate modified
  modified_base 2: mod_base = OTHER; note = 2'-fluoro modified nucleotide
  modified_base 3: mod_base = OTHER; note = 2'-O-methyl modified nucleotide
  modified_base 4: mod_base = OTHER; note = 2'-O-methyl modified nucleotide
  modified_base 5: mod_base = OTHER; note = 2'-O-methyl modified nucleotide
  modified_base 6: mod_base = OTHER; note = 2'-O-methyl modified nucleotide
  modified_base 7: mod_base = OTHER; note = 2'-O-methyl modified nucleotide
  modified_base 8: mod_base = OTHER; note = 2'-O-methyl modified nucleotide
  modified_base 9: mod_base = OTHER; note = 2'-O-methyl modified nucleotide
  modified_base 10: mod_base = OTHER; note = 2'-O-methyl modified nucleotide
  modified_base 11: mod_base = OTHER; note = 2'-O-methyl modified nucleotide
  modified_base 12: mod_base = OTHER; note = 2'-O-methyl modified nucleotide
  modified_base 13: mod_base = OTHER; note = 2'-O-methyl modified nucleotide
  modified_base 14: mod_base = OTHER; note = 2'-fluoro modified nucleotide
  modified_base 15: mod_base = OTHER; note = 2'-O-methyl modified nucleotide
  modified_base 16: mod_base = OTHER; note = 2'-O-methyl modified nucleotide
  modified_base 17: mod_base = OTHER; note = 2'-O-methyl modified nucleotide
  modified_base 18: mod_base = OTHER; note = 2'-O-methyl modified nucleotide
  modified_base 19: mod_base = OTHER; note = 2'-O-methyl modified nucleotide
  modified_base 20: mod_base = OTHER; note = 2'-O-methyl modified nucleotide
  modified_base 21: mod_base = OTHER; note = 2'-O-methyl modified nucleotide
  modified_base 22: mod_base = OTHER; note = 2'-fluoro modified nucleotide
  modified_base 23: mod_base = OTHER; note = 2'-fluoro modified nucleotide
  modified_base 24: mod_base = OTHER; note = 2'-fluoro modified nucleotide
  modified_base 25: mod_base = OTHER; note = 2'-O-methyl modified nucleotide
  modified_base 26: mod_base = OTHER; note = 2'-O-methyl modified nucleotide
  modified_base 27: mod_base = OTHER; note = 2'-O-methyl modified nucleotide
  modified_base 28: mod_base = OTHER; note = 2'-O-methyl modified nucleotide
  modified_base 29: mod_base = OTHER; note = 2'-O-methyl modified nucleotide
  modified_base 30: mod_base = OTHER; note = 2'-O-methyl modified nucleotide
  modified_base 31: mod_base = OTHER; note = 2'-O-methyl modified nucleotide
  modified_base 32: mod_base = OTHER; note = 2'-O-methyl modified nucleotide
  modified_base 33: mod_base = OTHER; note = 2'-O-methyl modified nucleotide
  misc_difference 34: note = 2'-O-methyl modified nucleotide may be trivalent N-acetylgalactosamine modified
ntggctcctgtgaagttgccttcacaggagccaa

SEQ ID NO: 1555 - RNA, 34 nt, synthetic construct
  source 1..34: mol_type = other RNA
  misc_difference 1: note = 2'-O-methyl modified nucleotide may be 5' phosphate modified
  modified_base 2: mod_base = OTHER; note = 2'-fluoro modified nucleotide
  modified_base 3: mod_base = OTHER; note = 2'-O-methyl modified nucleotide
  modified_base 4: mod_base = OTHER; note = 2'-O-methyl modified nucleotide
  modified_base 5: mod_base = OTHER; note = 2'-O-methyl modified nucleotide
  modified_base 6: mod_base = OTHER; note = 2'-O-methyl modified nucleotide
  modified_base 7: mod_base = OTHER; note = 2'-O-methyl modified nucleotide
  modified_base 8: mod_base = OTHER; note = 2'-O-methyl modified nucleotide
  modified_base 9: mod_base = OTHER; note = 2'-O-methyl modified nucleotide
  modified_base 10: mod_base = OTHER; note = 2'-O-methyl modified nucleotide
  modified_base 11: mod_base = OTHER; note = 2'-O-methyl modified nucleotide
  modified_base 12: mod_base = OTHER; note = 2'-O-methyl modified nucleotide
  modified_base 13: mod_base = OTHER; note = 2'-O-methyl modified nucleotide
  modified_base 14: mod_base = OTHER; note = 2'-fluoro modified nucleotide
  modified_base 15: mod_base = OTHER; note = 2'-O-methyl modified nucleotide
  modified_base 16: mod_base = OTHER; note = 2'-O-methyl modified nucleotide
  modified_base 17: mod_base = OTHER; note = 2'-O-methyl modified nucleotide
  modified_base 18: mod_base = OTHER; note = 2'-O-methyl modified nucleotide
  modified_base 19: mod_base = OTHER; note = 2'-O-methyl modified nucleotide
  modified_base 20: mod_base = OTHER; note = 2'-O-methyl modified nucleotide
  modified_base 21: mod_base = OTHER; note = 2'-O-methyl modified nucleotide
  modified_base 22: mod_base = OTHER; note = 2'-fluoro modified nucleotide
  modified_base 23: mod_base = OTHER; note = 2'-fluoro modified nucleotide
  modified_base 24: mod_base = OTHER; note = 2'-fluoro modified nucleotide
  modified_base 25: mod_base = OTHER; note = 2'-O-methyl modified nucleotide
  modified_base 26: mod_base = OTHER; note = 2'-O-methyl modified nucleotide
  modified_base 27: mod_base = OTHER; note = 2'-O-methyl modified nucleotide
  modified_base 28: mod_base = OTHER; note = 2'-O-methyl modified nucleotide
  modified_base 29: mod_base = OTHER; note = 2'-O-methyl modified nucleotide
  modified_base 30: mod_base = OTHER; note = 2'-O-methyl modified nucleotide
  modified_base 31: mod_base = OTHER; note = 2'-O-methyl modified nucleotide
  modified_base 32: mod_base = OTHER; note = 2'-O-methyl modified nucleotide
  modified_base 33: mod_base = OTHER; note = 2'-O-methyl modified nucleotide
  misc_difference 34: note = 2'-O-methyl modified nucleotide may be trivalent N-acetylgalactosamine modified
naaagtactcagacaccactgtctgagtacttta

SEQ ID NO: 1556 - RNA, 34 nt, synthetic construct
  source 1..34: mol_type = other RNA
  misc_difference 1: note = 2'-O-methyl modified nucleotide may be 5' phosphate modified
  modified_base 2: mod_base = OTHER; note = 2'-fluoro modified nucleotide
  modified_base 3: mod_base = OTHER; note = 2'-O-methyl modified nucleotide
  modified_base 4: mod_base = OTHER; note = 2'-O-methyl modified nucleotide
  modified_base 5: mod_base = OTHER; note = 2'-O-methyl modified nucleotide
  modified_base 6: mod_base = OTHER; note = 2'-O-methyl modified nucleotide
  modified_base 7: mod_base = OTHER; note = 2'-O-methyl modified nucleotide
  modified_base 8: mod_base = OTHER; note = 2'-O-methyl modified nucleotide
  modified_base 9: mod_base = OTHER; note = 2'-O-methyl modified nucleotide
  modified_base 10: mod_base = OTHER; note = 2'-O-methyl modified nucleotide
  modified_base 11: mod_base = OTHER; note = 2'-O-methyl modified nucleotide
  modified_base 12: mod_base = OTHER; note = 2'-O-methyl modified nucleotide
  modified_base 13: mod_base = OTHER; note = 2'-O-methyl modified nucleotide
  modified_base 14: mod_base = OTHER; note = 2'-fluoro modified nucleotide
  modified_base 15: mod_base = OTHER; note = 2'-O-methyl modified nucleotide
  modified_base 16: mod_base = OTHER; note = 2'-O-methyl modified nucleotide
  modified_base 17: mod_base = OTHER; note = 2'-O-methyl modified nucleotide
  modified_base 18: mod_base = OTHER; note = 2'-O-methyl modified nucleotide
  modified_base 19: mod_base = OTHER; note = 2'-O-methyl modified nucleotide
  modified_base 20: mod_base = OTHER; note = 2'-O-methyl modified nucleotide
  modified_base 21: mod_base = OTHER; note = 2'-O-methyl modified nucleotide
  modified_base 22: mod_base = OTHER; note = 2'-fluoro modified nucleotide
  modified_base 23: mod_base = OTHER; note = 2'-fluoro modified nucleotide
  modified_base 24: mod_base = OTHER; note = 2'-fluoro modified nucleotide
  modified_base 25: mod_base = OTHER; note = 2'-O-methyl modified nucleotide
  modified_base 26: mod_base = OTHER; note = 2'-O-methyl modified nucleotide
  modified_base 27: mod_base = OTHER; note = 2'-O-methyl modified nucleotide
  modified_base 28: mod_base = OTHER; note = 2'-O-methyl modified nucleotide
  modified_base 29: mod_base = OTHER; note = 2'-O-methyl modified nucleotide
  modified_base 30: mod_base = OTHER; note = 2'-O-methyl modified nucleotide
  modified_base 31: mod_base = OTHER; note = 2'-O-methyl modified nucleotide
  modified_base 32: mod_base = OTHER; note = 2'-O-methyl modified nucleotide
  modified_base 33: mod_base = OTHER; note = 2'-O-methyl modified nucleotide
  misc_difference 34: note = 2'-O-methyl modified nucleotide may be trivalent N-acetylgalactosamine modified
ngctcattgtctttcttgggaaagacaatgagca

SEQ ID NO: 1557 - RNA, 34 nt, synthetic construct
  source 1..34: mol_type = other RNA
  misc_difference 1: note = 2'-O-methyl modified nucleotide may be 5' phosphate modified
  modified_base 2: mod_base = OTHER; note = 2'-fluoro modified nucleotide
  modified_base 3: mod_base = OTHER; note = 2'-O-methyl modified nucleotide
  modified_base 4: mod_base = OTHER; note = 2'-O-methyl modified nucleotide
  modified_base 5: mod_base = OTHER; note = 2'-O-methyl modified nucleotide
  modified_base 6: mod_base = OTHER; note = 2'-O-methyl modified nucleotide
  modified_base 7: mod_base = OTHER; note = 2'-O-methyl modified nucleotide
  modified_base 8: mod_base = OTHER; note = 2'-O-methyl modified nucleotide
  modified_base 9: mod_base = OTHER; note = 2'-O-methyl modified nucleotide
  modified_base 10: mod_base = OTHER; note = 2'-O-methyl modified nucleotide
  modified_base 11: mod_base = OTHER; note = 2'-O-methyl modified nucleotide
  modified_base 12: mod_base = OTHER; note = 2'-O-methyl modified nucleotide
  modified_base 13: mod_base = OTHER; note = 2'-O-methyl modified nucleotide
  modified_base 14: mod_base = OTHER; note = 2'-fluoro modified nucleotide
  modified_base 15: mod_base = OTHER; note = 2'-O-methyl modified nucleotide
  modified_base 16: mod_base = OTHER; note = 2'-O-methyl modified nucleotide
  modified_base 17: mod_base = OTHER; note = 2'-O-methyl modified nucleotide
  modified_base 18: mod_base = OTHER; note = 2'-O-methyl modified nucleotide
  modified_base 19: mod_base = OTHER; note = 2'-O-methyl modified nucleotide
  modified_base 20: mod_base = OTHER; note = 2'-O-methyl modified nucleotide
  modified_base 21: mod_base = OTHER; note = 2'-O-methyl modified nucleotide
  modified_base 22: mod_base = OTHER; note = 2'-fluoro modified nucleotide
  modified_base 23: mod_base = OTHER; note = 2'-fluoro modified nucleotide
  modified_base 24: mod_base = OTHER; note = 2'-fluoro modified nucleotide
  modified_base 25: mod_base = OTHER; note = 2'-O-methyl modified nucleotide
  modified_base 26: mod_base = OTHER; note = 2'-O-methyl modified nucleotide
  modified_base 27: mod_base = OTHER; note = 2'-O-methyl modified nucleotide
  modified_base 28: mod_base = OTHER; note = 2'-O-methyl modified nucleotide
  modified_base 29: mod_base = OTHER; note = 2'-O-methyl modified nucleotide
  modified_base 30: mod_base = OTHER; note = 2'-O-methyl modified nucleotide
  modified_base 31: mod_base = OTHER; note = 2'-O-methyl modified nucleotide
  modified_base 32: mod_base = OTHER; note = 2'-O-methyl modified nucleotide
  modified_base 33: mod_base = OTHER; note = 2'-O-methyl modified nucleotide
  misc_difference 34: note = 2'-O-methyl modified nucleotide may be trivalent N-acetylgalactosamine modified
ntaaaattcaggaattcctattcctgaattttaa

SEQ ID NO: 1558 - RNA, 34 nt, synthetic construct
  source 1..34: mol_type = other RNA
  misc_difference 1: note = 2'-O-methyl modified nucleotide may be 5' phosphate modified
  modified_base 2: mod_base = OTHER; note = 2'-fluoro modified nucleotide
  modified_base 3: mod_base = OTHER; note = 2'-O-methyl modified nucleotide
  modified_base 4: mod_base = OTHER; note = 2'-O-methyl modified nucleotide
  modified_base 5: mod_base = OTHER; note = 2'-O-methyl modified nucleotide
  modified_base 6: mod_base = OTHER; note = 2'-O-methyl modified nucleotide
  modified_base 7: mod_base = OTHER; note = 2'-O-methyl modified nucleotide
  modified_base 8: mod_base = OTHER; note = 2'-O-methyl modified nucleotide
  modified_base 9: mod_base = OTHER; note = 2'-O-methyl modified nucleotide
  modified_base 10: mod_base = OTHER; note = 2'-O-methyl modified nucleotide
  modified_base 11: mod_base = OTHER; note = 2'-O-methyl modified nucleotide
  modified_base 12: mod_base = OTHER; note = 2'-O-methyl modified nucleotide
  modified_base 13: mod_base = OTHER; note = 2'-O-methyl modified nucleotide
  modified_base 14: mod_base = OTHER; note = 2'-fluoro modified nucleotide
  modified_base 15: mod_base = OTHER; note = 2'-O-methyl modified nucleotide
  modified_base 16: mod_base = OTHER; note = 2'-O-methyl modified nucleotide
  modified_base 17: mod_base = OTHER; note = 2'-O-methyl modified nucleotide
  modified_base 18: mod_base = OTHER; note = 2'-O-methyl modified nucleotide
  modified_base 19: mod_base = OTHER; note = 2'-O-methyl modified nucleotide
  modified_base 20: mod_base = OTHER; note = 2'-O-methyl modified nucleotide
  modified_base 21: mod_base = OTHER; note = 2'-O-methyl modified nucleotide
  modified_base 22: mod_base = OTHER; note = 2'-fluoro modified nucleotide
  modified_base 23: mod_base = OTHER; note = 2'-fluoro modified nucleotide
  modified_base 24: mod_base = OTHER; note = 2'-fluoro modified nucleotide
  modified_base 25: mod_base = OTHER; note = 2'-O-methyl modified nucleotide
  modified_base 26: mod_base = OTHER; note = 2'-O-methyl modified nucleotide
  modified_base 27: mod_base = OTHER; note = 2'-O-methyl modified nucleotide
  modified_base 28: mod_base = OTHER; note = 2'-O-methyl modified nucleotide
  modified_base 29: mod_base = OTHER; note = 2'-O-methyl modified nucleotide
  modified_base 30: mod_base = OTHER; note = 2'-O-methyl modified nucleotide
  modified_base 31: mod_base = OTHER; note = 2'-O-methyl modified nucleotide
  modified_base 32: mod_base = OTHER; note = 2'-O-methyl modified nucleotide
  modified_base 33: mod_base = OTHER; note = 2'-O-methyl modified nucleotide
  misc_difference 34: note = 2'-O-methyl modified nucleotide may be trivalent N-acetylgalactosamine modified
ngagatcttggcctgccatcaggccaagatctca

SEQ ID NO: 1559 - RNA, 34 nt, synthetic construct
  source 1..34: mol_type = other RNA
  misc_difference 1: note = 2'-O-methyl modified nucleotide may be 5' phosphate modified
  modified_base 2: mod_base = OTHER; note = 2'-fluoro modified nucleotide
  modified_base 3: mod_base = OTHER; note = 2'-O-methyl modified nucleotide
  modified_base 4: mod_base = OTHER; note = 2'-O-methyl modified nucleotide
  modified_base 5: mod_base = OTHER; note = 2'-O-methyl modified nucleotide
  modified_base 6: mod_base = OTHER; note = 2'-O-methyl modified nucleotide
  modified_base 7: mod_base = OTHER; note = 2'-O-methyl modified nucleotide
  modified_base 8: mod_base = OTHER; note = 2'-O-methyl modified nucleotide
  modified_base 9: mod_base = OTHER; note = 2'-O-methyl modified nucleotide
  modified_base 10: mod_base = OTHER; note = 2'-O-methyl modified nucleotide
  modified_base 11: mod_base = OTHER; note = 2'-O-methyl modified nucleotide
  modified_base 12: mod_base = OTHER; note = 2'-O-methyl modified nucleotide
  modified_base 13: mod_base = OTHER; note = 2'-O-methyl modified nucleotide
  modified_base 14: mod_base = OTHER; note = 2'-fluoro modified nucleotide
  modified_base 15: mod_base = OTHER; note = 2'-O-methyl modified nucleotide
  modified_base 16: mod_base = OTHER; note = 2'-O-methyl modified nucleotide
  modified_base 17: mod_base = OTHER; note = 2'-O-methyl modified nucleotide
  modified_base 18: mod_base = OTHER; note = 2'-O-methyl modified nucleotide
  modified_base 19: mod_base = OTHER; note = 2'-O-methyl modified nucleotide
  modified_base 20: mod_base = OTHER; note = 2'-O-methyl modified nucleotide
  modified_base 21: mod_base = OTHER; note = 2'-O-methyl modified nucleotide
  modified_base 22: mod_base = OTHER; note = 2'-fluoro modified nucleotide
  modified_base 23: mod_base = OTHER; note = 2'-fluoro modified nucleotide
  modified_base 24: mod_base = OTHER; note = 2'-fluoro modified nucleotide
  modified_base 25: mod_base = OTHER; note = 2'-O-methyl modified nucleotide
  modified_base 26: mod_base = OTHER; note = 2'-O-methyl modified nucleotide
  modified_base 27: mod_base = OTHER; note = 2'-O-methyl modified nucleotide
  modified_base 28: mod_base = OTHER; note = 2'-O-methyl modified nucleotide
  modified_base 29: mod_base = OTHER; note = 2'-O-methyl modified nucleotide
  modified_base 30: mod_base = OTHER; note = 2'-O-methyl modified nucleotide
  modified_base 31: mod_base = OTHER; note = 2'-O-methyl modified nucleotide
  modified_base 32: mod_base = OTHER; note = 2'-O-methyl modified nucleotide
  modified_base 33: mod_base = OTHER; note = 2'-O-methyl modified nucleotide
  misc_difference 34: note = 2'-O-methyl modified nucleotide may be trivalent N-acetylgalactosamine modified
ngagcatctctctcacagctgagagagatgctca

SEQ ID NO: 1560 - RNA, 34 nt, synthetic construct
  source 1..34: mol_type = other RNA
  misc_difference 1: note = 2'-O-methyl modified nucleotide may be 5' phosphate modified
  modified_base 2: mod_base = OTHER; note = 2'-fluoro modified nucleotide
  modified_base 3: mod_base = OTHER; note = 2'-O-methyl modified nucleotide
  modified_base 4: mod_base = OTHER; note = 2'-O-methyl modified nucleotide
  modified_base 5: mod_base = OTHER; note = 2'-O-methyl modified nucleotide
  modified_base 6: mod_base = OTHER; note = 2'-O-methyl modified nucleotide
  modified_base 7: mod_base = OTHER; note = 2'-O-methyl modified nucleotide
  modified_base 8: mod_base = OTHER; note = 2'-O-methyl modified nucleotide
  modified_base 9: mod_base = OTHER; note = 2'-O-methyl modified nucleotide
  modified_base 10: mod_base = OTHER; note = 2'-O-methyl modified nucleotide
  modified_base 11: mod_base = OTHER; note = 2'-O-methyl modified nucleotide
  modified_base 12: mod_base = OTHER; note = 2'-O-methyl modified nucleotide
  modified_base 13: mod_base = OTHER; note = 2'-O-methyl modified nucleotide
  modified_base 14: mod_base = OTHER; note = 2'-fluoro modified nucleotide
  modified_base 15: mod_base = OTHER; note = 2'-O-methyl modified nucleotide
  modified_base 16: mod_base = OTHER; note = 2'-O-methyl modified nucleotide
  modified_base 17: mod_base = OTHER; note = 2'-O-methyl modified nucleotide
  modified_base 18: mod_base = OTHER; note = 2'-O-methyl modified nucleotide
  modified_base 19: mod_base = OTHER; note = 2'-O-methyl modified nucleotide
  modified_base 20: mod_base = OTHER; note = 2'-O-methyl modified nucleotide
  modified_base 21: mod_base = OTHER; note = 2'-O-methyl modified nucleotide
  modified_base 22: mod_base = OTHER; note = 2'-fluoro modified nucleotide
  modified_base 23: mod_base = OTHER; note = 2'-fluoro modified nucleotide
  modified_base 24: mod_base = OTHER; note = 2'-fluoro modified nucleotide
  modified_base 25: mod_base = OTHER; note = 2'-O-methyl modified nucleotide
  modified_base 26: mod_base = OTHER; note = 2'-O-methyl modified nucleotide
  modified_base 27: mod_base = OTHER; note = 2'-O-methyl modified nucleotide
  modified_base 28: mod_base = OTHER; note = 2'-O-methyl modified nucleotide
  modified_base 29: mod_base = OTHER; note = 2'-O-methyl modified nucleotide
  modified_base 30: mod_base = OTHER; note = 2'-O-methyl modified nucleotide
  modified_base 31: mod_base = OTHER; note = 2'-O-methyl modified nucleotide
  modified_base 32: mod_base = OTHER; note = 2'-O-methyl modified nucleotide
  modified_base 33: mod_base = OTHER; note = 2'-O-methyl modified nucleotide
  misc_difference 34: note = 2'-O-methyl modified nucleotide may be trivalent N-acetylgalactosamine modified
naaccgtcatagcagtggactgctatgacggtta

SEQ ID NO: 1561 - RNA, 34 nt, synthetic construct
  source 1..34: mol_type = other RNA
  misc_difference 1: note = 2'-O-methyl modified nucleotide may be 5' phosphate modified
  modified_base 2: mod_base = OTHER; note = 2'-fluoro modified nucleotide
  modified_base 3: mod_base = OTHER; note = 2'-O-methyl modified nucleotide
  modified_base 4: mod_base = OTHER; note = 2'-O-methyl modified nucleotide
  modified_base 5: mod_base = OTHER; note = 2'-O-methyl modified nucleotide
  modified_base 6: mod_base = OTHER; note = 2'-O-methyl modified nucleotide
  modified_base 7: mod_base = OTHER; note = 2'-O-methyl modified nucleotide
  modified_base 8: mod_base = OTHER; note = 2'-O-methyl modified nucleotide
  modified_base 9: mod_base = OTHER; note = 2'-O-methyl modified nucleotide
  modified_base 10: mod_base = OTHER; note = 2'-O-methyl modified nucleotide
  modified_base 11: mod_base = OTHER; note = 2'-O-methyl modified nucleotide
  modified_base 12: mod_base = OTHER; note = 2'-O-methyl modified nucleotide
  modified_base 13: mod_base = OTHER; note = 2'-O-methyl modified nucleotide
  modified_base 14: mod_base = OTHER; note = 2'-fluoro modified nucleotide
  modified_base 15: mod_base = OTHER; note = 2'-O-methyl modified nucleotide
  modified_base 16: mod_base = OTHER; note = 2'-O-methyl modified nucleotide
  modified_base 17: mod_base = OTHER; note = 2'-O-methyl modified nucleotide
  modified_base 18: mod_base = OTHER; note = 2'-O-methyl modified nucleotide
  modified_base 19: mod_base = OTHER; note = 2'-O-methyl modified nucleotide
  modified_base 20: mod_base = OTHER; note = 2'-O-methyl modified nucleotide
  modified_base 21: mod_base = OTHER; note = 2'-O-methyl modified nucleotide
  modified_base 22: mod_base = OTHER; note = 2'-fluoro modified nucleotide
  modified_base 23: mod_base = OTHER; note = 2'-fluoro modified nucleotide
  modified_base 24: mod_base = OTHER; note = 2'-fluoro modified nucleotide
  modified_base 25: mod_base = OTHER; note = 2'-O-methyl modified nucleotide
  modified_base 26: mod_base = OTHER; note = 2'-O-methyl modified nucleotide
  modified_base 27: mod_base = OTHER; note = 2'-O-methyl modified nucleotide
  modified_base 28: mod_base = OTHER; note = 2'-O-methyl modified nucleotide
  modified_base 29: mod_base = OTHER; note = 2'-O-methyl modified nucleotide
  modified_base 30: mod_base = OTHER; note = 2'-O-methyl modified nucleotide
  modified_base 31: mod_base = OTHER; note = 2'-O-methyl modified nucleotide
  modified_base 32: mod_base = OTHER; note = 2'-O-methyl modified nucleotide
  modified_base 33: mod_base = OTHER; note = 2'-O-methyl modified nucleotide
  misc_difference 34: note = 2'-O-methyl modified nucleotide may be trivalent N-acetylgalactosamine modified
nagagctttgatatcctgtgatatcaaagctcta

SEQ ID NO: 1562 - RNA, 34 nt, synthetic construct
  source 1..34: mol_type = other RNA
  misc_difference 1: note = 2'-O-methyl modified nucleotide may be 5' phosphate modified
  modified_base 2: mod_base = OTHER; note = 2'-fluoro modified nucleotide
  modified_base 3: mod_base = OTHER; note = 2'-O-methyl modified nucleotide
  modified_base 4: mod_base = OTHER; note = 2'-O-methyl modified nucleotide
  modified_base 5: mod_base = OTHER; note = 2'-O-methyl modified nucleotide
  modified_base 6: mod_base = OTHER; note = 2'-O-methyl modified nucleotide
  modified_base 7: mod_base = OTHER; note = 2'-O-methyl modified nucleotide
  modified_base 8: mod_base = OTHER; note = 2'-O-methyl modified nucleotide
  modified_base 9: mod_base = OTHER; note = 2'-O-methyl modified nucleotide
  modified_base 10: mod_base = OTHER; note = 2'-O-methyl modified nucleotide
  modified_base 11: mod_base = OTHER; note = 2'-O-methyl modified nucleotide
  modified_base 12: mod_base = OTHER; note = 2'-O-methyl modified nucleotide
  modified_base 13: mod_base = OTHER; note = 2'-O-methyl modified nucleotide
  modified_base 14: mod_base = OTHER; note = 2'-fluoro modified nucleotide
  modified_base 15: mod_base = OTHER; note = 2'-O-methyl modified nucleotide
  modified_base 16: mod_base = OTHER; note = 2'-O-methyl modified nucleotide
  modified_base 17: mod_base = OTHER; note = 2'-O-methyl modified nucleotide
  modified_base 18: mod_base = OTHER; note = 2'-O-methyl modified nucleotide
  modified_base 19: mod_base = OTHER; note = 2'-O-methyl modified nucleotide
  modified_base 20: mod_base = OTHER; note = 2'-O-methyl modified nucleotide
  modified_base 21: mod_base = OTHER; note = 2'-O-methyl modified nucleotide
  modified_base 22: mod_base = OTHER; note = 2'-fluoro modified nucleotide
  modified_base 23: mod_base = OTHER; note = 2'-fluoro modified nucleotide
  modified_base 24: mod_base = OTHER; note = 2'-fluoro modified nucleotide
  modified_base 25: mod_base = OTHER; note = 2'-O-methyl modified nucleotide
  modified_base 26: mod_base = OTHER; note = 2'-O-methyl modified nucleotide
  modified_base 27: mod_base = OTHER; note = 2'-O-methyl modified nucleotide
  modified_base 28: mod_base = OTHER; note = 2'-O-methyl modified nucleotide
  modified_base 29: mod_base = OTHER; note = 2'-O-methyl modified nucleotide
  modified_base 30: mod_base = OTHER; note = 2'-O-methyl modified nucleotide
  modified_base 31: mod_base = OTHER; note = 2'-O-methyl modified nucleotide
  modified_base 32: mod_base = OTHER; note = 2'-O-methyl modified nucleotide
  modified_base 33: mod_base = OTHER; note = 2'-O-methyl modified nucleotide
  misc_difference 34: note = 2'-O-methyl modified nucleotide may be trivalent N-acetylgalactosamine modified
nacaatgtgctgctgtcagcagcagcacattgta

SEQ ID NO: 1563 - RNA, 34 nt, synthetic construct
  source 1..34: mol_type = other RNA
  misc_difference 1: note = 2'-O-methyl modified nucleotide may be 5' phosphate modified
  modified_base 2: mod_base = OTHER; note = 2'-fluoro modified nucleotide
  modified_base 3: mod_base = OTHER; note = 2'-O-methyl modified nucleotide
  modified_base 4: mod_base = OTHER; note = 2'-O-methyl modified nucleotide
  modified_base 5: mod_base = OTHER; note = 2'-O-methyl modified nucleotide
  modified_base 6: mod_base = OTHER; note = 2'-O-methyl modified nucleotide
  modified_base 7: mod_base = OTHER; note = 2'-O-methyl modified nucleotide
  modified_base 8: mod_base = OTHER; note = 2'-O-methyl modified nucleotide
  modified_base 9: mod_base = OTHER; note = 2'-O-methyl modified nucleotide
  modified_base 10: mod_base = OTHER; note = 2'-O-methyl modified nucleotide
  modified_base 11: mod_base = OTHER; note = 2'-O-methyl modified nucleotide
  modified_base 12: mod_base = OTHER; note = 2'-O-methyl modified nucleotide
  modified_base 13: mod_base = OTHER; note = 2'-O-methyl modified nucleotide
  modified_base 14: mod_base = OTHER; note = 2'-fluoro modified nucleotide
  modified_base 15: mod_base = OTHER; note = 2'-O-methyl modified nucleotide
  modified_base 16: mod_base = OTHER; note = 2'-O-methyl modified nucleotide
  modified_base 17: mod_base = OTHER; note = 2'-O-methyl modified nucleotide
  modified_base 18: mod_base = OTHER; note = 2'-O-methyl modified nucleotide
  modified_base 19: mod_base = OTHER; note = 2'-O-methyl modified nucleotide
  modified_base 20: mod_base = OTHER; note = 2'-O-methyl modified nucleotide
  modified_base 21: mod_base = OTHER; note = 2'-O-methyl modified nucleotide
  modified_base 22: mod_base = OTHER; note = 2'-fluoro modified nucleotide
  modified_base 23: mod_base = OTHER; note = 2'-fluoro modified nucleotide
  modified_base 24: mod_base = OTHER; note = 2'-fluoro modified nucleotide
  modified_base 25: mod_base = OTHER; note = 2'-O-methyl modified nucleotide
  modified_base 26: mod_base = OTHER; note = 2'-O-methyl modified nucleotide
  modified_base 27: mod_base = OTHER; note = 2'-O-methyl modified nucleotide
  modified_base 28: mod_base = OTHER; note = 2'-O-methyl modified nucleotide
  modified_base 29: mod_base = OTHER; note = 2'-O-methyl modified nucleotide
  modified_base 30: mod_base = OTHER; note = 2'-O-methyl modified nucleotide
  modified_base 31: mod_base = OTHER; note = 2'-O-methyl modified nucleotide
  modified_base 32: mod_base = OTHER; note = 2'-O-methyl modified nucleotide
  modified_base 33: mod_base = OTHER; note = 2'-O-methyl modified nucleotide
  misc_difference 34: note = 2'-O-methyl modified nucleotide may be trivalent N-acetylgalactosamine modified
nggtacgggtagaagccagcttctacccgtacca

SEQ ID NO: 1564 - RNA, 34 nt, synthetic construct
  source 1..34: mol_type = other RNA
  misc_difference 1: note = 2'-O-methyl modified nucleotide may be 5' phosphate modified
  modified_base 2: mod_base = OTHER; note = 2'-fluoro modified nucleotide
  modified_base 3: mod_base = OTHER; note = 2'-O-methyl modified nucleotide
  modified_base 4: mod_base = OTHER; note = 2'-O-methyl modified nucleotide
  modified_base 5: mod_base = OTHER; note = 2'-O-methyl modified nucleotide
  modified_base 6: mod_base = OTHER; note = 2'-O-methyl modified nucleotide
  modified_base 7: mod_base = OTHER; note = 2'-O-methyl modified nucleotide
  modified_base 8: mod_base = OTHER; note = 2'-O-methyl modified nucleotide
  modified_base 9: mod_base = OTHER; note = 2'-O-methyl modified nucleotide
  modified_base 10: mod_base = OTHER; note = 2'-O-methyl modified nucleotide
  modified_base 11: mod_base = OTHER; note = 2'-O-methyl modified nucleotide
  modified_base 12: mod_base = OTHER; note = 2'-O-methyl modified nucleotide
  modified_base 13: mod_base = OTHER; note = 2'-O-methyl modified nucleotide
  modified_base 14: mod_base = OTHER; note = 2'-fluoro modified nucleotide
  modified_base 15: mod_base = OTHER; note = 2'-O-methyl modified nucleotide
  modified_base 16: mod_base = OTHER; note = 2'-O-methyl modified nucleotide
  modified_base 17: mod_base = OTHER; note = 2'-O-methyl modified nucleotide
  modified_base 18: mod_base = OTHER; note = 2'-O-methyl modified nucleotide
  modified_base 19: mod_base = OTHER; note = 2'-O-methyl modified nucleotide
  modified_base 20: mod_base = OTHER; note = 2'-O-methyl modified nucleotide
  modified_base 21: mod_base = OTHER; note = 2'-O-methyl modified nucleotide
  modified_base 22: mod_base = OTHER; note = 2'-fluoro modified nucleotide
  modified_base 23: mod_base = OTHER; note = 2'-fluoro modified nucleotide
  modified_base 24: mod_base = OTHER; note = 2'-fluoro modified nucleotide
  modified_base 25: mod_base = OTHER; note = 2'-O-methyl modified nucleotide
  modified_base 26: mod_base = OTHER; note = 2'-O-methyl modified nucleotide
  modified_base 27: mod_base = OTHER; note = 2'-O-methyl modified nucleotide
  modified_base 28: mod_base = OTHER; note = 2'-O-methyl modified nucleotide
  modified_base 29: mod_base = OTHER; note = 2'-O-methyl modified nucleotide
  modified_base 30: mod_base = OTHER; note = 2'-O-methyl modified nucleotide
  modified_base 31: mod_base = OTHER; note = 2'-O-methyl modified nucleotide
  modified_base 32: mod_base = OTHER; note = 2'-O-methyl modified nucleotide
  modified_base 33: mod_base = OTHER; note = 2'-O-methyl modified nucleotide
  misc_difference 34: note = 2'-O-methyl modified nucleotide may be trivalent N-acetylgalactosamine modified
ncagacctagacctggtcacaggtctaggtctga

SEQ ID NO: 1565 - RNA, 34 nt, synthetic construct
  source 1..34: mol_type = other RNA
  misc_difference 1: note = 2'-O-methyl modified nucleotide may be 5' phosphate modified
  modified_base 2: mod_base = OTHER; note = 2'-fluoro modified nucleotide
  modified_base 3: mod_base = OTHER; note = 2'-O-methyl modified nucleotide
  modified_base 4: mod_base = OTHER; note = 2'-O-methyl modified nucleotide
  modified_base 5: mod_base = OTHER; note = 2'-O-methyl modified nucleotide
  modified_base 6: mod_base = OTHER; note = 2'-O-methyl modified nucleotide
  modified_base 7: mod_base = OTHER; note = 2'-O-methyl modified nucleotide
  modified_base 8: mod_base = OTHER; note = 2'-O-methyl modified nucleotide
  modified_base 9: mod_base = OTHER; note = 2'-O-methyl modified nucleotide
  modified_base 10: mod_base = OTHER; note = 2'-O-methyl modified nucleotide
  modified_base 11: mod_base = OTHER; note = 2'-O-methyl modified nucleotide
  modified_base 12: mod_base = OTHER; note = 2'-O-methyl modified nucleotide
  modified_base 13: mod_base = OTHER; note = 2'-O-methyl modified nucleotide
  modified_base 14: mod_base = OTHER; note = 2'-fluoro modified nucleotide
  modified_base 15: mod_base = OTHER; note = 2'-O-methyl modified nucleotide
  modified_base 16: mod_base = OTHER; note = 2'-O-methyl modified nucleotide
  modified_base 17: mod_base = OTHER; note = 2'-O-methyl modified nucleotide
  modified_base 18: mod_base = OTHER; note = 2'-O-methyl modified nucleotide
  modified_base 19: mod_base = OTHER; note = 2'-O-methyl modified nucleotide
  modified_base 20: mod_base = OTHER; note = 2'-O-methyl modified nucleotide
  modified_base 21: mod_base = OTHER; note = 2'-O-methyl modified nucleotide
  modified_base 22: mod_base = OTHER; note = 2'-fluoro modified nucleotide
  modified_base 23: mod_base = OTHER; note = 2'-fluoro modified nucleotide
  modified_base 24: mod_base = OTHER; note = 2'-fluoro modified nucleotide
  modified_base 25: mod_base = OTHER; note = 2'-O-methyl modified nucleotide
  modified_base 26: mod_base = OTHER; note = 2'-O-methyl modified nucleotide
  modified_base 27: mod_base = OTHER; note = 2'-O-methyl modified nucleotide
  modified_base 28: mod_base = OTHER; note = 2'-O-methyl modified nucleotide
  modified_base 29: mod_base = OTHER; note = 2'-O-methyl modified nucleotide
  modified_base 30: mod_base = OTHER; note = 2'-O-methyl modified nucleotide
  modified_base 31: mod_base = OTHER; note = 2'-O-methyl modified nucleotide
  modified_base 32: mod_base = OTHER; note = 2'-O-methyl modified nucleotide
  modified_base 33: mod_base = OTHER; note = 2'-O-methyl modified nucleotide
  misc_difference 34: note = 2'-O-methyl modified nucleotide may be trivalent N-acetylgalactosamine modified
nttctcttgtgaactatcaagttcacaagagaaa

SEQ ID NO: 1566 - RNA, 34 nt, synthetic construct
  source 1..34: mol_type = other RNA
  misc_difference 1: note = 2'-O-methyl modified nucleotide may be 5' phosphate modified
  modified_base 2: mod_base = OTHER; note = 2'-fluoro modified nucleotide
  modified_base 3: mod_base = OTHER; note = 2'-O-methyl modified nucleotide
  modified_base 4: mod_base = OTHER; note = 2'-O-methyl modified nucleotide
  modified_base 5: mod_base = OTHER; note = 2'-O-methyl modified nucleotide
  modified_base 6: mod_base = OTHER; note = 2'-O-methyl modified nucleotide
  modified_base 7: mod_base = OTHER; note = 2'-O-methyl modified nucleotide
  modified_base 8: mod_base = OTHER; note = 2'-O-methyl modified nucleotide
  modified_base 9: mod_base = OTHER; note = 2'-O-methyl modified nucleotide
  modified_base 10: mod_base = OTHER; note = 2'-O-methyl modified nucleotide
  modified_base 11: mod_base = OTHER; note = 2'-O-methyl modified nucleotide
  modified_base 12: mod_base = OTHER; note = 2'-O-methyl modified nucleotide
  modified_base 13: mod_base = OTHER; note = 2'-O-methyl modified nucleotide
  modified_base 14: mod_base = OTHER; note = 2'-fluoro modified nucleotide
  modified_base 15: mod_base = OTHER; note = 2'-O-methyl modified nucleotide
  modified_base 16: mod_base = OTHER; note = 2'-O-methyl modified nucleotide
  modified_base 17: mod_base = OTHER; note = 2'-O-methyl modified nucleotide
  modified_base 18: mod_base = OTHER; note = 2'-O-methyl modified nucleotide
  modified_base 19: mod_base = OTHER; note = 2'-O-methyl modified nucleotide
  modified_base 20: mod_base = OTHER; note = 2'-O-methyl modified nucleotide
  modified_base 21: mod_base = OTHER; note = 2'-O-methyl modified nucleotide
  modified_base 22: mod_base = OTHER; note = 2'-fluoro modified nucleotide
  modified_base 23: mod_base = OTHER; note = 2'-fluoro modified nucleotide
  modified_base 24: mod_base = OTHER; note = 2'-fluoro modified nucleotide
  modified_base 25: mod_base = OTHER; note = 2'-O-methyl modified nucleotide
  modified_base 26: mod_base = OTHER; note = 2'-O-methyl modified nucleotide
  modified_base 27: mod_base = OTHER; note = 2'-O-methyl modified nucleotide
  modified_base 28: mod_base = OTHER; note = 2'-O-methyl modified nucleotide
  modified_base 29: mod_base = OTHER; note = 2'-O-methyl modified nucleotide
  modified_base 30: mod_base = OTHER; note = 2'-O-methyl modified nucleotide
  modified_base 31: mod_base = OTHER; note = 2'-O-methyl modified nucleotide
  modified_base 32: mod_base = OTHER; note = 2'-O-methyl modified nucleotide
  modified_base 33: mod_base = OTHER; note = 2'-O-methyl modified nucleotide
  misc_difference 34: note = 2'-O-methyl modified nucleotide may be trivalent N-acetylgalactosamine modified
nttcaggaattcctgcttccaggaattcctgaaa

SEQ ID NO: 1567 - RNA, 34 nt, synthetic construct
  source 1..34: mol_type = other RNA
  misc_difference 1: note = 2'-O-methyl modified nucleotide may be 5' phosphate modified
  modified_base 2: mod_base = OTHER; note = 2'-fluoro modified nucleotide
  modified_base 3: mod_base = OTHER; note = 2'-O-methyl modified nucleotide
  modified_base 4: mod_base = OTHER; note = 2'-O-methyl modified nucleotide
  modified_base 5: mod_base = OTHER; note = 2'-O-methyl modified nucleotide
  modified_base 6: mod_base = OTHER; note = 2'-O-methyl modified nucleotide
  modified_base 7: mod_base = OTHER; note = 2'-O-methyl modified nucleotide
  modified_base 8: mod_base = OTHER; note = 2'-O-methyl modified nucleotide
  modified_base 9: mod_base = OTHER; note = 2'-O-methyl modified nucleotide
  modified_base 10: mod_base = OTHER; note = 2'-O-methyl modified nucleotide
  modified_base 11: mod_base = OTHER; note = 2'-O-methyl modified nucleotide
  modified_base 12: mod_base = OTHER; note = 2'-O-methyl modified nucleotide
  modified_base 13: mod_base = OTHER; note = 2'-O-methyl modified nucleotide
  modified_base 14: mod_base = OTHER; note = 2'-fluoro modified nucleotide
  modified_base 15: mod_base = OTHER; note = 2'-O-methyl modified nucleotide
  modified_base 16: mod_base = OTHER; note = 2'-O-methyl modified nucleotide
  modified_base 17: mod_base = OTHER; note = 2'-O-methyl modified nucleotide
  modified_base 18: mod_base = OTHER; note = 2'-O-methyl modified nucleotide
  modified_base 19: mod_base = OTHER; note = 2'-O-methyl modified nucleotide
  modified_base 20: mod_base = OTHER; note = 2'-O-methyl modified nucleotide
  modified_base 21: mod_base = OTHER; note = 2'-O-methyl modified nucleotide
  modified_base 22: mod_base = OTHER; note = 2'-fluoro modified nucleotide
  modified_base 23: mod_base = OTHER; note = 2'-fluoro modified nucleotide
  modified_base 24: mod_base = OTHER; note = 2'-fluoro modified nucleotide
  modified_base 25: mod_base = OTHER; note = 2'-O-methyl modified nucleotide
  modified_base 26: mod_base = OTHER; note = 2'-O-methyl modified nucleotide
  modified_base 27: mod_base = OTHER; note = 2'-O-methyl modified nucleotide
  modified_base 28: mod_base = OTHER; note = 2'-O-methyl modified nucleotide
  modified_base 29: mod_base = OTHER; note = 2'-O-methyl modified nucleotide
  modified_base 30: mod_base = OTHER; note = 2'-O-methyl modified nucleotide
  modified_base 31: mod_base = OTHER; note = 2'-O-methyl modified nucleotide
  modified_base 32: mod_base = OTHER; note = 2'-O-methyl modified nucleotide
  modified_base 33: mod_base = OTHER; note = 2'-O-methyl modified nucleotide
  misc_difference 34: note = 2'-O-methyl modified nucleotide may be trivalent N-acetylgalactosamine modified
nccaggttttccatatccttatggaaaacctgga

SEQ ID NO: 1568 - RNA, 34 nt, synthetic construct
  source 1..34: mol_type = other RNA
  misc_difference 1: note = 2'-O-methyl modified nucleotide may be 5' phosphate modified
  modified_base 2: mod_base = OTHER; note = 2'-fluoro modified nucleotide
  modified_base 3: mod_base = OTHER; note = 2'-O-methyl modified nucleotide
  modified_base 4: mod_base = OTHER; note = 2'-O-methyl modified nucleotide
  modified_base 5: mod_base = OTHER; note = 2'-O-methyl modified nucleotide
  modified_base 6: mod_base = OTHER; note = 2'-O-methyl modified nucleotide
  modified_base 7: mod_base = OTHER; note = 2'-O-methyl modified nucleotide
  modified_base 8: mod_base = OTHER; note = 2'-O-methyl modified nucleotide
  modified_base 9: mod_base = OTHER; note = 2'-O-methyl modified nucleotide
  modified_base 10: mod_base = OTHER; note = 2'-O-methyl modified nucleotide
  modified_base 11: mod_base = OTHER; note = 2'-O-methyl modified nucleotide
  modified_base 12: mod_base = OTHER; note = 2'-O-methyl modified nucleotide
  modified_base 13: mod_base = OTHER; note = 2'-O-methyl modified nucleotide
  modified_base 14: mod_base = OTHER; note = 2'-fluoro modified nucleotide
  modified_base 15: mod_base = OTHER; note = 2'-O-methyl modified nucleotide
  modified_base 16: mod_base = OTHER; note = 2'-O-methyl modified nucleotide
  modified_base 17: mod_base = OTHER; note = 2'-O-methyl modified nucleotide
  modified_base 18: mod_base = OTHER; note = 2'-O-methyl modified nucleotide
  modified_base 19: mod_base = OTHER; note = 2'-O-methyl modified nucleotide
  modified_base 20: mod_base = OTHER; note = 2'-O-methyl modified nucleotide
  modified_base 21: mod_base = OTHER; note = 2'-O-methyl modified nucleotide
  modified_base 22: mod_base = OTHER; note = 2'-fluoro modified nucleotide
  modified_base 23: mod_base = OTHER; note = 2'-fluoro modified nucleotide
  modified_base 24: mod_base = OTHER; note = 2'-fluoro modified nucleotide
  modified_base 25: mod_base = OTHER; note = 2'-O-methyl modified nucleotide
  modified_base 26: mod_base = OTHER; note = 2'-O-methyl modified nucleotide
  modified_base 27: mod_base = OTHER; note = 2'-O-methyl modified nucleotide
  modified_base 28: mod_base = OTHER; note = 2'-O-methyl modified nucleotide
  modified_base 29: mod_base = OTHER; note = 2'-O-methyl modified nucleotide
  modified_base 30: mod_base = OTHER; note = 2'-O-methyl modified nucleotide
  modified_base 31: mod_base = OTHER; note = 2'-O-methyl modified nucleotide
  modified_base 32: mod_base = OTHER; note = 2'-O-methyl modified nucleotide
  modified_base 33: mod_base = OTHER; note = 2'-O-methyl modified nucleotide
  misc_difference 34: note = 2'-O-methyl modified nucleotide may be trivalent N-acetylgalactosamine modified
ncaacttgaatgaaacgactttcattcaagttga

SEQ ID NO: 1569 - RNA, 34 nt, synthetic construct
  source 1..34: mol_type = other RNA
  misc_difference 1: note = 2'-O-methyl modified nucleotide may be 5' phosphate modified
  modified_base 2: mod_base = OTHER; note = 2'-fluoro modified nucleotide
  modified_base 3: mod_base = OTHER; note = 2'-O-methyl modified nucleotide
  modified_base 4: mod_base = OTHER; note = 2'-O-methyl modified nucleotide
  modified_base 5: mod_base = OTHER; note = 2'-O-methyl modified nucleotide
  modified_base 6: mod_base = OTHER; note = 2'-O-methyl modified nucleotide
  modified_base 7: mod_base = OTHER; note = 2'-O-methyl modified nucleotide
  modified_base 8: mod_base = OTHER; note = 2'-O-methyl modified nucleotide
  modified_base 9: mod_base = OTHER; note = 2'-O-methyl modified nucleotide
  modified_base 10: mod_base = OTHER; note = 2'-O-methyl modified nucleotide
  modified_base 11: mod_base = OTHER; note = 2'-O-methyl modified nucleotide
  modified_base 12: mod_base = OTHER; note = 2'-O-methyl modified nucleotide
  modified_base 13: mod_base = OTHER; note = 2'-O-methyl modified nucleotide
  modified_base 14: mod_base = OTHER; note = 2'-fluoro modified nucleotide
  modified_base 15: mod_base = OTHER; note = 2'-O-methyl modified nucleotide
  modified_base 16: mod_base = OTHER; note = 2'-O-methyl modified nucleotide
  modified_base 17: mod_base = OTHER; note = 2'-O-methyl modified nucleotide
  modified_base 18: mod_base = OTHER; note = 2'-O-methyl modified nucleotide
  modified_base 19: mod_base = OTHER; note = 2'-O-methyl modified nucleotide
  modified_base 20: mod_base = OTHER; note = 2'-O-methyl modified nucleotide
  modified_base 21: mod_base = OTHER; note = 2'-O-methyl modified nucleotide
  modified_base 22: mod_base = OTHER; note = 2'-fluoro modified nucleotide
  modified_base 23: mod_base = OTHER; note = 2'-fluoro modified nucleotide
  modified_base 24: mod_base = OTHER; note = 2'-fluoro modified nucleotide
  modified_base 25: mod_base = OTHER; note = 2'-O-methyl modified nucleotide
  modified_base 26: mod_base = OTHER; note = 2'-O-methyl modified nucleotide
  modified_base 27: mod_base = OTHER; note = 2'-O-methyl modified nucleotide
  modified_base 28: mod_base = OTHER; note = 2'-O-methyl modified nucleotide
  modified_base 29: mod_base = OTHER; note = 2'-O-methyl modified nucleotide
  modified_base 30: mod_base = OTHER; note = 2'-O-methyl modified nucleotide
  modified_base 31: mod_base = OTHER; note = 2'-O-methyl modified nucleotide
  modified_base 32: mod_base = OTHER; note = 2'-O-methyl modified nucleotide
  modified_base 33: mod_base = OTHER; note = 2'-O-methyl modified nucleotide
  misc_difference 34: note = 2'-O-methyl modified nucleotide may be trivalent N-acetylgalactosamine modified
ngtgctgctgtcagcacaagctgacagcagcaca

SEQ ID NO: 1570 - RNA, 34 nt, synthetic construct
  source 1..34: mol_type = other RNA
  misc_difference 1: note = 2'-O-methyl modified nucleotide may be 5' phosphate modified
  modified_base 2: mod_base = OTHER; note = 2'-fluoro modified nucleotide
  modified_base 3: mod_base = OTHER; note = 2'-O-methyl modified nucleotide
  modified_base 4: mod_base = OTHER; note = 2'-O-methyl modified nucleotide
  modified_base 5: mod_base = OTHER; note = 2'-O-methyl modified nucleotide
  modified_base 6: mod_base = OTHER; note = 2'-O-methyl modified nucleotide
  modified_base 7: mod_base = OTHER; note = 2'-O-methyl modified nucleotide
  modified_base 8: mod_base = OTHER; note = 2'-O-methyl modified nucleotide
  modified_base 9: mod_base = OTHER; note = 2'-O-methyl modified nucleotide
  modified_base 10: mod_base = OTHER; note = 2'-O-methyl modified nucleotide
  modified_base 11: mod_base = OTHER; note = 2'-O-methyl modified nucleotide
  modified_base 12: mod_base = OTHER; note = 2'-O-methyl modified nucleotide
  modified_base 13: mod_base = OTHER; note = 2'-O-methyl modified nucleotide
  modified_base 14: mod_base = OTHER; note = 2'-fluoro modified nucleotide
  modified_base 15: mod_base = OTHER; note = 2'-O-methyl modified nucleotide
  modified_base 16: mod_base = OTHER; note = 2'-O-methyl modified nucleotide
  modified_base 17: mod_base = OTHER; note = 2'-O-methyl modified nucleotide
  modified_base 18: mod_base = OTHER; note = 2'-O-methyl modified nucleotide
  modified_base 19: mod_base = OTHER; note = 2'-O-methyl modified nucleotide
  modified_base 20: mod_base = OTHER; note = 2'-O-methyl modified nucleotide
  modified_base 21: mod_base = OTHER; note = 2'-O-methyl modified nucleotide
  modified_base 22: mod_base = OTHER; note = 2'-fluoro modified nucleotide
  modified_base 23: mod_base = OTHER; note = 2'-fluoro modified nucleotide
  modified_base 24: mod_base = OTHER; note = 2'-fluoro modified nucleotide
  modified_base 25: mod_base = OTHER; note = 2'-O-methyl modified nucleotide
  modified_base 26: mod_base = OTHER; note = 2'-O-methyl modified nucleotide
  modified_base 27: mod_base = OTHER; note = 2'-O-methyl modified nucleotide
  modified_base 28: mod_base = OTHER; note = 2'-O-methyl modified nucleotide
  modified_base 29: mod_base = OTHER; note = 2'-O-methyl modified nucleotide
  modified_base 30: mod_base = OTHER; note = 2'-O-methyl modified nucleotide
  modified_base 31: mod_base = OTHER; note = 2'-O-methyl modified nucleotide
  modified_base 32: mod_base = OTHER; note = 2'-O-methyl modified nucleotide
  modified_base 33: mod_base = OTHER; note = 2'-O-methyl modified nucleotide
  misc_difference 34: note = 2'-O-methyl modified nucleotide may be trivalent N-acetylgalactosamine modified
ngacctccttccgagtcagctcggaaggaggtca

SEQ ID NO: 1571 - RNA, 34 nt, synthetic construct
  source 1..34: mol_type = other RNA
  misc_difference 1: note = 2'-O-methyl modified nucleotide may be 5' phosphate modified
  modified_base 2: mod_base = OTHER; note = 2'-fluoro modified nucleotide
  modified_base 3: mod_base = OTHER; note = 2'-O-methyl modified nucleotide
  modified_base 4: mod_base = OTHER; note = 2'-O-methyl modified nucleotide
  modified_base 5: mod_base = OTHER; note = 2'-O-methyl modified nucleotide
  modified_base 6: mod_base = OTHER; note = 2'-O-methyl modified nucleotide
  modified_base 7: mod_base = OTHER; note = 2'-O-methyl modified nucleotide
  modified_base 8: mod_base = OTHER; note = 2'-O-methyl modified nucleotide
  modified_base 9: mod_base = OTHER; note = 2'-O-methyl modified nucleotide
  modified_base 10: mod_base = OTHER; note = 2'-O-methyl modified nucleotide
  modified_base 11: mod_base = OTHER; note = 2'-O-methyl modified nucleotide
  modified_base 12: mod_base = OTHER; note = 2'-O-methyl modified nucleotide
  modified_base 13: mod_base = OTHER; note = 2'-O-methyl modified nucleotide
  modified_base 14: mod_base = OTHER; note = 2'-fluoro modified nucleotide
  modified_base 15: mod_base = OTHER; note = 2'-O-methyl modified nucleotide
  modified_base 16: mod_base = OTHER; note = 2'-O-methyl modified nucleotide
  modified_base 17: mod_base = OTHER; note = 2'-O-methyl modified nucleotide
  modified_base 18: mod_base = OTHER; note = 2'-O-methyl modified nucleotide
  modified_base 19: mod_base = OTHER; note = 2'-O-methyl modified nucleotide
  modified_base 20: mod_base = OTHER; note = 2'-O-methyl modified nucleotide
  modified_base 21: mod_base = OTHER; note = 2'-O-methyl modified nucleotide
  modified_base 22: mod_base = OTHER; note = 2'-fluoro modified nucleotide
  modified_base 23: mod_base = OTHER; note = 2'-fluoro modified nucleotide
  modified_base 24: mod_base = OTHER; note = 2'-fluoro modified nucleotide
  modified_base 25: mod_base = OTHER; note = 2'-O-methyl modified nucleotide
  modified_base 26: mod_base = OTHER; note = 2'-O-methyl modified nucleotide
  modified_base 27: mod_base = OTHER; note = 2'-O-methyl modified nucleotide
  modified_base 28: mod_base = OTHER; note = 2'-O-methyl modified nucleotide
  modified_base 29: mod_base = OTHER; note = 2'-O-methyl modified nucleotide
  modified_base 30: mod_base = OTHER; note = 2'-O-methyl modified nucleotide
  modified_base 31: mod_base = OTHER; note = 2'-O-methyl modified nucleotide
  modified_base 32: mod_base = OTHER; note = 2'-O-methyl modified nucleotide
  modified_base 33: mod_base = OTHER; note = 2'-O-methyl modified nucleotide
  misc_difference 34: note = 2'-O-methyl modified nucleotide may be trivalent N-acetylgalactosamine modified
ncaattaagttgactagacagtcaacttaattga

SEQ ID NO: 1572 - RNA, 34 nt, synthetic construct
  source 1..34: mol_type = other RNA
  misc_difference 1: note = 2'-O-methyl modified nucleotide may be 5' phosphate modified
  modified_base 2: mod_base = OTHER; note = 2'-fluoro modified nucleotide
  modified_base 3: mod_base = OTHER; note = 2'-O-methyl modified nucleotide
  modified_base 4: mod_base = OTHER; note = 2'-O-methyl modified nucleotide
  modified_base 5: mod_base = OTHER; note = 2'-O-methyl modified nucleotide
  modified_base 6: mod_base = OTHER; note = 2'-O-methyl modified nucleotide
  modified_base 7: mod_base = OTHER; note = 2'-O-methyl modified nucleotide
  modified_base 8: mod_base = OTHER; note = 2'-O-methyl modified nucleotide
  modified_base 9: mod_base = OTHER; note = 2'-O-methyl modified nucleotide
  modified_base 10: mod_base = OTHER; note = 2'-O-methyl modified nucleotide
  modified_base 11: mod_base = OTHER; note = 2'-O-methyl modified nucleotide
  modified_base 12: mod_base = OTHER; note = 2'-O-methyl modified nucleotide
  modified_base 13: mod_base = OTHER; note = 2'-O-methyl modified nucleotide
  modified_base 14: mod_base = OTHER; note = 2'-fluoro modified nucleotide
  modified_base 15: mod_base = OTHER; note = 2'-O-methyl modified nucleotide
  modified_base 16: mod_base = OTHER; note = 2'-O-methyl modified nucleotide
  modified_base 17: mod_base = OTHER; note = 2'-O-methyl modified nucleotide
  modified_base 18: mod_base = OTHER; note = 2'-O-methyl modified nucleotide
  modified_base 19: mod_base = OTHER; note = 2'-O-methyl modified nucleotide
  modified_base 20: mod_base = OTHER; note = 2'-O-methyl modified nucleotide
  modified_base 21: mod_base = OTHER; note = 2'-O-methyl modified nucleotide
  modified_base 22: mod_base = OTHER; note = 2'-fluoro modified nucleotide
  modified_base 23: mod_base = OTHER; note = 2'-fluoro modified nucleotide
  modified_base 24: mod_base = OTHER; note = 2'-fluoro modified nucleotide
  modified_base 25: mod_base = OTHER; note = 2'-O-methyl modified nucleotide
  modified_base 26: mod_base = OTHER; note = 2'-O-methyl modified nucleotide
  modified_base 27: mod_base = OTHER; note = 2'-O-methyl modified nucleotide
  modified_base 28: mod_base = OTHER; note = 2'-O-methyl modified nucleotide
  modified_base 29: mod_base = OTHER; note = 2'-O-methyl modified nucleotide
  modified_base 30: mod_base = OTHER; note = 2'-O-methyl modified nucleotide
  modified_base 31: mod_base = OTHER; note = 2'-O-methyl modified nucleotide
  modified_base 32: mod_base = OTHER; note = 2'-O-methyl modified nucleotide
  modified_base 33: mod_base = OTHER; note = 2'-O-methyl modified nucleotide
  misc_difference 34: note = 2'-O-methyl modified nucleotide may be trivalent N-acetylgalactosamine modified
ntgacacgttcgccgctggcggcgaacgtgtcaa

SEQ ID NO: 1573 - RNA, 34 nt, synthetic construct
  source 1..34: mol_type = other RNA
  misc_difference 1: note = 2'-O-methyl modified nucleotide may be 5' phosphate modified
  modified_base 2: mod_base = OTHER; note = 2'-fluoro modified nucleotide
  modified_base 3: mod_base = OTHER; note = 2'-O-methyl modified nucleotide
  modified_base 4: mod_base = OTHER; note = 2'-O-methyl modified nucleotide
  modified_base 5: mod_base = OTHER; note = 2'-O-methyl modified nucleotide
  modified_base 6: mod_base = OTHER; note = 2'-O-methyl modified nucleotide
  modified_base 7: mod_base = OTHER; note = 2'-O-methyl modified nucleotide
  modified_base 8: mod_base = OTHER; note = 2'-O-methyl modified nucleotide
  modified_base 9: mod_base = OTHER; note = 2'-O-methyl modified nucleotide
  modified_base 10: mod_base = OTHER; note = 2'-O-methyl modified nucleotide
  modified_base 11: mod_base = OTHER; note = 2'-O-methyl modified nucleotide
  modified_base 12: mod_base = OTHER; note = 2'-O-methyl modified nucleotide
  modified_base 13: mod_base = OTHER; note = 2'-O-methyl modified nucleotide
  modified_base 14: mod_base = OTHER; note = 2'-fluoro modified nucleotide
  modified_base 15: mod_base = OTHER; note = 2'-O-methyl modified nucleotide
  modified_base 16: mod_base = OTHER; note = 2'-O-methyl modified nucleotide
  modified_base 17: mod_base = OTHER; note = 2'-O-methyl modified nucleotide
  modified_base 18: mod_base = OTHER; note = 2'-O-methyl modified nucleotide
  modified_base 19: mod_base = OTHER; note = 2'-O-methyl modified nucleotide
  modified_base 20: mod_base = OTHER; note = 2'-O-methyl modified nucleotide
  modified_base 21: mod_base = OTHER; note = 2'-O-methyl modified nucleotide
  modified_base 22: mod_base = OTHER; note = 2'-fluoro modified nucleotide
  modified_base 23: mod_base = OTHER; note = 2'-fluoro modified nucleotide
  modified_base 24: mod_base = OTHER; note = 2'-fluoro modified nucleotide
  modified_base 25: mod_base = OTHER; note = 2'-O-methyl modified nucleotide
  modified_base 26: mod_base = OTHER; note = 2'-O-methyl modified nucleotide
  modified_base 27: mod_base = OTHER; note = 2'-O-methyl modified nucleotide
  modified_base 28: mod_base = OTHER; note = 2'-O-methyl modified nucleotide
  modified_base 29: mod_base = OTHER; note = 2'-O-methyl modified nucleotide
  modified_base 30: mod_base = OTHER; note = 2'-O-methyl modified nucleotide
  modified_base 31: mod_base = OTHER; note = 2'-O-methyl modified nucleotide
  modified_base 32: mod_base = OTHER; note = 2'-O-methyl modified nucleotide
  modified_base 33: mod_base = OTHER; note = 2'-O-methyl modified nucleotide
  misc_difference 34: note = 2'-O-methyl modified nucleotide may be trivalent N-acetylgalactosamine modified
ncattgtctttcttggaagcaagaaagacaatga

SEQ ID NO: 1574 - RNA, 34 nt, synthetic construct
  source 1..34: mol_type = other RNA
  misc_difference 1: note = 2'-O-methyl modified nucleotide may be 5' phosphate modified
  modified_base 2: mod_base = OTHER; note = 2'-fluoro modified nucleotide
  modified_base 3: mod_base = OTHER; note = 2'-O-methyl modified nucleotide
  modified_base 4: mod_base = OTHER; note = 2'-O-methyl modified nucleotide
  modified_base 5: mod_base = OTHER; note = 2'-O-methyl modified nucleotide
  modified_base 6: mod_base = OTHER; note = 2'-O-methyl modified nucleotide
  modified_base 7: mod_base = OTHER; note = 2'-O-methyl modified nucleotide
  modified_base 8: mod_base = OTHER; note = 2'-O-methyl modified nucleotide
  modified_base 9: mod_base = OTHER; note = 2'-O-methyl modified nucleotide
  modified_base 10: mod_base = OTHER; note = 2'-O-methyl modified nucleotide
  modified_base 11: mod_base = OTHER; note = 2'-O-methyl modified nucleotide
  modified_base 12: mod_base = OTHER; note = 2'-O-methyl modified nucleotide
  modified_base 13: mod_base = OTHER; note = 2'-O-methyl modified nucleotide
  modified_base 14: mod_base = OTHER; note = 2'-fluoro modified nucleotide
  modified_base 15: mod_base = OTHER; note = 2'-O-methyl modified nucleotide
  modified_base 16: mod_base = OTHER; note = 2'-O-methyl modified nucleotide
  modified_base 17: mod_base = OTHER; note = 2'-O-methyl modified nucleotide
  modified_base 18: mod_base = OTHER; note = 2'-O-methyl modified nucleotide
  modified_base 19: mod_base = OTHER; note = 2'-O-methyl modified nucleotide
  modified_base 20: mod_base = OTHER; note = 2'-O-methyl modified nucleotide
  modified_base 21: mod_base = OTHER; note = 2'-O-methyl modified nucleotide
  modified_base 22: mod_base = OTHER; note = 2'-fluoro modified nucleotide
  modified_base 23: mod_base = OTHER; note = 2'-fluoro modified nucleotide
  modified_base 24: mod_base = OTHER; note = 2'-fluoro modified nucleotide
  modified_base 25: mod_base = OTHER; note = 2'-O-methyl modified nucleotide
  modified_base 26: mod_base = OTHER; note = 2'-O-methyl modified nucleotide
  modified_base 27: mod_base = OTHER; note = 2'-O-methyl modified nucleotide
  modified_base 28: mod_base = OTHER; note = 2'-O-methyl modified nucleotide
  modified_base 29: mod_base = OTHER; note = 2'-O-methyl modified nucleotide
  modified_base 30: mod_base = OTHER; note = 2'-O-methyl modified nucleotide
  modified_base 31: mod_base = OTHER; note = 2'-O-methyl modified nucleotide
  modified_base 32: mod_base = OTHER; note = 2'-O-methyl modified nucleotide
  modified_base 33: mod_base = OTHER; note = 2'-O-methyl modified nucleotide
  misc_difference 34: note = 2'-O-methyl modified nucleotide may be trivalent N-acetylgalactosamine modified
nccaacttgaatgaaacgattcattcaagttgga

SEQ ID NO: 1575 - RNA, 34 nt, synthetic construct
  source 1..34: mol_type = other RNA
  misc_difference 1: note = 2'-O-methyl modified nucleotide may be 5' phosphate modified
  modified_base 2: mod_base = OTHER; note = 2'-fluoro modified nucleotide
  modified_base 3: mod_base = OTHER; note = 2'-O-methyl modified nucleotide
  modified_base 4: mod_base = OTHER; note = 2'-O-methyl modified nucleotide
  modified_base 5: mod_base = OTHER; note = 2'-O-methyl modified nucleotide
  modified_base 6: mod_base = OTHER; note = 2'-O-methyl modified nucleotide
  modified_base 7: mod_base = OTHER; note = 2'-O-methyl modified nucleotide
  modified_base 8: mod_base = OTHER; note = 2'-O-methyl modified nucleotide
  modified_base 9: mod_base = OTHER; note = 2'-O-methyl modified nucleotide
  modified_base 10: mod_base = OTHER; note = 2'-O-methyl modified nucleotide
  modified_base 11: mod_base = OTHER; note = 2'-O-methyl modified nucleotide
  modified_base 12: mod_base = OTHER; note = 2'-O-methyl modified nucleotide
  modified_base 13: mod_base = OTHER; note = 2'-O-methyl modified nucleotide
  modified_base 14: mod_base = OTHER; note = 2'-fluoro modified nucleotide
  modified_base 15: mod_base = OTHER; note = 2'-O-methyl modified nucleotide
  modified_base 16: mod_base = OTHER; note = 2'-O-methyl modified nucleotide
  modified_base 17: mod_base = OTHER; note = 2'-O-methyl modified nucleotide
  modified_base 18: mod_base = OTHER; note = 2'-O-methyl modified nucleotide
  modified_base 19: mod_base = OTHER; note = 2'-O-methyl modified nucleotide
  modified_base 20: mod_base = OTHER; note = 2'-O-methyl modified nucleotide
  modified_base 21: mod_base = OTHER; note = 2'-O-methyl modified nucleotide
  modified_base 22: mod_base = OTHER; note = 2'-fluoro modified nucleotide
  modified_base 23: mod_base = OTHER; note = 2'-fluoro modified nucleotide
  modified_base 24: mod_base = OTHER; note = 2'-fluoro modified nucleotide
  modified_base 25: mod_base = OTHER; note = 2'-O-methyl modified nucleotide
  modified_base 26: mod_base = OTHER; note = 2'-O-methyl modified nucleotide
  modified_base 27: mod_base = OTHER; note = 2'-O-methyl modified nucleotide
  modified_base 28: mod_base = OTHER; note = 2'-O-methyl modified nucleotide
  modified_base 29: mod_base = OTHER; note = 2'-O-methyl modified nucleotide
  modified_base 30: mod_base = OTHER; note = 2'-O-methyl modified nucleotide
  modified_base 31: mod_base = OTHER; note = 2'-O-methyl modified nucleotide
  modified_base 32: mod_base = OTHER; note = 2'-O-methyl modified nucleotide
  modified_base 33: mod_base = OTHER; note = 2'-O-methyl modified nucleotide
  misc_difference 34: note = 2'-O-methyl modified nucleotide may be trivalent N-acetylgalactosamine modified
ncacaaagtactcagacacctgagtactttgtga

SEQ ID NO: 1576 - RNA, 34 nt, synthetic construct
  source 1..34: mol_type = other RNA
  misc_difference 1: note = 2'-O-methyl modified nucleotide may be 5' phosphate modified
  modified_base 2: mod_base = OTHER; note = 2'-fluoro modified nucleotide
  modified_base 3: mod_base = OTHER; note = 2'-O-methyl modified nucleotide
  modified_base 4: mod_base = OTHER; note = 2'-O-methyl modified nucleotide
  modified_base 5: mod_base = OTHER; note = 2'-O-methyl modified nucleotide
  modified_base 6: mod_base = OTHER; note = 2'-O-methyl modified nucleotide
  modified_base 7: mod_base = OTHER; note = 2'-O-methyl modified nucleotide
  modified_base 8: mod_base = OTHER; note = 2'-O-methyl modified nucleotide
  modified_base 9: mod_base = OTHER; note = 2'-O-methyl modified nucleotide
  modified_base 10: mod_base = OTHER; note = 2'-O-methyl modified nucleotide
  modified_base 11: mod_base = OTHER; note = 2'-O-methyl modified nucleotide
  modified_base 12: mod_base = OTHER; note = 2'-O-methyl modified nucleotide
  modified_base 13: mod_base = OTHER; note = 2'-O-methyl modified nucleotide
  modified_base 14: mod_base = OTHER; note = 2'-fluoro modified nucleotide
  modified_base 15: mod_base = OTHER; note = 2'-O-methyl modified nucleotide
  modified_base 16: mod_base = OTHER; note = 2'-O-methyl modified nucleotide
  modified_base 17: mod_base = OTHER; note = 2'-O-methyl modified nucleotide
  modified_base 18: mod_base = OTHER; note = 2'-O-methyl modified nucleotide
  modified_base 19: mod_base = OTHER; note = 2'-O-methyl modified nucleotide
  modified_base 20: mod_base = OTHER; note = 2'-O-methyl modified nucleotide
  modified_base 21: mod_base = OTHER; note = 2'-O-methyl modified nucleotide
  modified_base 22: mod_base = OTHER; note = 2'-fluoro modified nucleotide
  modified_base 23: mod_base = OTHER; note = 2'-fluoro modified nucleotide
  modified_base 24: mod_base = OTHER; note = 2'-fluoro modified nucleotide
  modified_base 25: mod_base = OTHER; note = 2'-O-methyl modified nucleotide
  modified_base 26: mod_base = OTHER; note = 2'-O-methyl modified nucleotide
  modified_base 27: mod_base = OTHER; note = 2'-O-methyl modified nucleotide
  modified_base 28: mod_base = OTHER; note = 2'-O-methyl modified nucleotide
  modified_base 29: mod_base = OTHER; note = 2'-O-methyl modified nucleotide
  modified_base 30: mod_base = OTHER; note = 2'-O-methyl modified nucleotide
  modified_base 31: mod_base = OTHER; note = 2'-O-methyl modified nucleotide
  modified_base 32: mod_base = OTHER; note = 2'-O-methyl modified nucleotide
  modified_base 33: mod_base = OTHER; note = 2'-O-methyl modified nucleotide
  misc_difference 34: note = 2'-O-methyl modified nucleotide may be trivalent N-acetylgalactosamine modified
ntgcagtggtaggtgacgccacctaccactgcaa

SEQ ID NO: 1577 - RNA, 34 nt, synthetic construct
  source 1..34: mol_type = other RNA
  misc_difference 1: note = 2'-O-methyl modified nucleotide may be 5' phosphate modified
  modified_base 2: mod_base = OTHER; note = 2'-fluoro modified nucleotide
  modified_base 3: mod_base = OTHER; note = 2'-O-methyl modified nucleotide
  modified_base 4: mod_base = OTHER; note = 2'-O-methyl modified nucleotide
  modified_base 5: mod_base = OTHER; note = 2'-O-methyl modified nucleotide
  modified_base 6: mod_base = OTHER; note = 2'-O-methyl modified nucleotide
  modified_base 7: mod_base = OTHER; note = 2'-O-methyl modified nucleotide
  modified_base 8: mod_base = OTHER; note = 2'-O-methyl modified nucleotide
  modified_base 9: mod_base = OTHER; note = 2'-O-methyl modified nucleotide
  modified_base 10: mod_base = OTHER; note = 2'-O-methyl modified nucleotide
  modified_base 11: mod_base = OTHER; note = 2'-O-methyl modified nucleotide
  modified_base 12: mod_base = OTHER; note = 2'-O-methyl modified nucleotide
  modified_base 13: mod_base = OTHER; note = 2'-O-methyl modified nucleotide
  modified_base 14: mod_base = OTHER; note = 2'-fluoro modified nucleotide
  modified_base 15: mod_base = OTHER; note = 2'-O-methyl modified nucleotide
  modified_base 16: mod_base = OTHER; note = 2'-O-methyl modified nucleotide
  modified_base 17: mod_base = OTHER; note = 2'-O-methyl modified nucleotide
  modified_base 18: mod_base = OTHER; note = 2'-O-methyl modified nucleotide
  modified_base 19: mod_base = OTHER; note = 2'-O-methyl modified nucleotide
  modified_base 20: mod_base = OTHER; note = 2'-O-methyl modified nucleotide
  modified_base 21: mod_base = OTHER; note = 2'-O-methyl modified nucleotide
  modified_base 22: mod_base = OTHER; note = 2'-fluoro modified nucleotide
  modified_base 23: mod_base = OTHER; note = 2'-fluoro modified nucleotide
  modified_base 24: mod_base = OTHER; note = 2'-fluoro modified nucleotide
  modified_base 25: mod_base = OTHER; note = 2'-O-methyl modified nucleotide
  modified_base 26: mod_base = OTHER; note = 2'-O-methyl modified nucleotide
  modified_base 27: mod_base = OTHER; note = 2'-O-methyl modified nucleotide
  modified_base 28: mod_base = OTHER; note = 2'-O-methyl modified nucleotide
  modified_base 29: mod_base = OTHER; note = 2'-O-methyl modified nucleotide
  modified_base 30: mod_base = OTHER; note = 2'-O-methyl modified nucleotide
  modified_base 31: mod_base = OTHER; note = 2'-O-methyl modified nucleotide
  modified_base 32: mod_base = OTHER; note = 2'-O-methyl modified nucleotide
  modified_base 33: mod_base = OTHER; note = 2'-O-methyl modified nucleotide
  misc_difference 34: note = 2'-O-methyl modified nucleotide may be trivalent N-acetylgalactosamine modified
ntcatgaggatgatgacatcatcatcctcatgaa

SEQ ID NO: 1578 - RNA, 34 nt, synthetic construct
  source 1..34: mol_type = other RNA
  misc_difference 1: note = 2'-O-methyl modified nucleotide may be 5' phosphate modified
  modified_base 2: mod_base = OTHER; note = 2'-fluoro modified nucleotide
  modified_base 3: mod_base = OTHER; note = 2'-O-methyl modified nucleotide
  modified_base 4: mod_base = OTHER; note = 2'-O-methyl modified nucleotide
  modified_base 5: mod_base = OTHER; note = 2'-O-methyl modified nucleotide
  modified_base 6: mod_base = OTHER; note = 2'-O-methyl modified nucleotide
  modified_base 7: mod_base = OTHER; note = 2'-O-methyl modified nucleotide
  modified_base 8: mod_base = OTHER; note = 2'-O-methyl modified nucleotide
  modified_base 9: mod_base = OTHER; note = 2'-O-methyl modified nucleotide
  modified_base 10: mod_base = OTHER; note = 2'-O-methyl modified nucleotide
  modified_base 11: mod_base = OTHER; note = 2'-O-methyl modified nucleotide
  modified_base 12: mod_base = OTHER; note = 2'-O-methyl modified nucleotide
  modified_base 13: mod_base = OTHER; note = 2'-O-methyl modified nucleotide
  modified_base 14: mod_base = OTHER; note = 2'-fluoro modified nucleotide
  modified_base 15: mod_base = OTHER; note = 2'-O-methyl modified nucleotide
  modified_base 16: mod_base = OTHER; note = 2'-O-methyl modified nucleotide
  modified_base 17: mod_base = OTHER; note = 2'-O-methyl modified nucleotide
  modified_base 18: mod_base = OTHER; note = 2'-O-methyl modified nucleotide
  modified_base 19: mod_base = OTHER; note = 2'-O-methyl modified nucleotide
  modified_base 20: mod_base = OTHER; note = 2'-O-methyl modified nucleotide
  modified_base 21: mod_base = OTHER; note = 2'-O-methyl modified nucleotide
  modified_base 22: mod_base = OTHER; note = 2'-fluoro modified nucleotide
  modified_base 23: mod_base = OTHER; note = 2'-fluoro modified nucleotide
  modified_base 24: mod_base = OTHER; note = 2'-fluoro modified nucleotide
  modified_base 25: mod_base = OTHER; note = 2'-O-methyl modified nucleotide
  modified_base 26: mod_base = OTHER; note = 2'-O-methyl modified nucleotide
  modified_base 27: mod_base = OTHER; note = 2'-O-methyl modified nucleotide
  modified_base 28: mod_base = OTHER; note = 2'-O-methyl modified nucleotide
  modified_base 29: mod_base = OTHER; note = 2'-O-methyl modified nucleotide
  modified_base 30: mod_base = OTHER; note = 2'-O-methyl modified nucleotide
  modified_base 31: mod_base = OTHER; note = 2'-O-methyl modified nucleotide
  modified_base 32: mod_base = OTHER; note = 2'-O-methyl modified nucleotide
  modified_base 33: mod_base = OTHER; note = 2'-O-methyl modified nucleotide
  misc_difference 34: note = 2'-O-methyl modified nucleotide may be trivalent N-acetylgalactosamine modified
nttcaacttgtggtcttcagaccacaagttgaaa

SEQ ID NO: 1579 - RNA, 34 nt, synthetic construct
  source 1..34: mol_type = other RNA
  misc_difference 1: note = 2'-O-methyl modified nucleotide may be 5' phosphate modified
  modified_base 2: mod_base = OTHER; note = 2'-fluoro modified nucleotide
  modified_base 3: mod_base = OTHER; note = 2'-O-methyl modified nucleotide
  modified_base 4: mod_base = OTHER; note = 2'-O-methyl modified nucleotide
  modified_base 5: mod_base = OTHER; note = 2'-O-methyl modified nucleotide
  modified_base 6: mod_base = OTHER; note = 2'-O-methyl modified nucleotide
  modified_base 7: mod_base = OTHER; note = 2'-O-methyl modified nucleotide
  modified_base 8: mod_base = OTHER; note = 2'-O-methyl modified nucleotide
  modified_base 9: mod_base = OTHER; note = 2'-O-methyl modified nucleotide
  modified_base 10: mod_base = OTHER; note = 2'-O-methyl modified nucleotide
  modified_base 11: mod_base = OTHER; note = 2'-O-methyl modified nucleotide
  modified_base 12: mod_base = OTHER; note = 2'-O-methyl modified nucleotide
  modified_base 13: mod_base = OTHER; note = 2'-O-methyl modified nucleotide
  modified_base 14: mod_base = OTHER; note = 2'-fluoro modified nucleotide
  modified_base 15: mod_base = OTHER; note = 2'-O-methyl modified nucleotide
  modified_base 16: mod_base = OTHER; note = 2'-O-methyl modified nucleotide
  modified_base 17: mod_base = OTHER; note = 2'-O-methyl modified nucleotide
  modified_base 18: mod_base = OTHER; note = 2'-O-methyl modified nucleotide
  modified_base 19: mod_base = OTHER; note = 2'-O-methyl modified nucleotide
  modified_base 20: mod_base = OTHER; note = 2'-O-methyl modified nucleotide
  modified_base 21: mod_base = OTHER; note = 2'-O-methyl modified nucleotide
  modified_base 22: mod_base = OTHER; note = 2'-fluoro modified nucleotide
  modified_base 23: mod_base = OTHER; note = 2'-fluoro modified nucleotide
  modified_base 24: mod_base = OTHER; note = 2'-fluoro modified nucleotide
  modified_base 25: mod_base = OTHER; note = 2'-O-methyl modified nucleotide
  modified_base 26: mod_base = OTHER; note = 2'-O-methyl modified nucleotide
  modified_base 27: mod_base = OTHER; note = 2'-O-methyl modified nucleotide
  modified_base 28: mod_base = OTHER; note = 2'-O-methyl modified nucleotide
  modified_base 29: mod_base = OTHER; note = 2'-O-methyl modified nucleotide
  modified_base 30: mod_base = OTHER; note = 2'-O-methyl modified nucleotide
  modified_base 31: mod_base = OTHER; note = 2'-O-methyl modified nucleotide
  modified_base 32: mod_base = OTHER; note = 2'-O-methyl modified nucleotide
  modified_base 33: mod_base = OTHER; note = 2'-O-methyl modified nucleotide
  misc_difference 34: note = 2'-O-methyl modified nucleotide may be trivalent N-acetylgalactosamine modified
ngtagttggaggaagcctccttcctccaactaca

SEQ ID NO: 1580 - RNA, 34 nt, synthetic construct
  source 1..34: mol_type = other RNA
  misc_difference 1: note = 2'-O-methyl modified nucleotide may be 5' phosphate modified
  modified_base 2: mod_base = OTHER; note = 2'-fluoro modified nucleotide
  modified_base 3: mod_base = OTHER; note = 2'-O-methyl modified nucleotide
  modified_base 4: mod_base = OTHER; note = 2'-O-methyl modified nucleotide
  modified_base 5: mod_base = OTHER; note = 2'-O-methyl modified nucleotide
  modified_base 6: mod_base = OTHER; note = 2'-O-methyl modified nucleotide
  modified_base 7: mod_base = OTHER; note = 2'-O-methyl modified nucleotide
  modified_base 8: mod_base = OTHER; note = 2'-O-methyl modified nucleotide
  modified_base 9: mod_base = OTHER; note = 2'-O-methyl modified nucleotide
  modified_base 10: mod_base = OTHER; note = 2'-O-methyl modified nucleotide
  modified_base 11: mod_base = OTHER; note = 2'-O-methyl modified nucleotide
  modified_base 12: mod_base = OTHER; note = 2'-O-methyl modified nucleotide
  modified_base 13: mod_base = OTHER; note = 2'-O-methyl modified nucleotide
  modified_base 14: mod_base = OTHER; note = 2'-fluoro modified nucleotide
  modified_base 15: mod_base = OTHER; note = 2'-O-methyl modified nucleotide
  modified_base 16: mod_base = OTHER; note = 2'-O-methyl modified nucleotide
  modified_base 17: mod_base = OTHER; note = 2'-O-methyl modified nucleotide
  modified_base 18: mod_base = OTHER; note = 2'-O-methyl modified nucleotide
  modified_base 19: mod_base = OTHER; note = 2'-O-methyl modified nucleotide
  modified_base 20: mod_base = OTHER; note = 2'-O-methyl modified nucleotide
  modified_base 21: mod_base = OTHER; note = 2'-O-methyl modified nucleotide
  modified_base 22: mod_base = OTHER; note = 2'-fluoro modified nucleotide
  modified_base 23: mod_base = OTHER; note = 2'-fluoro modified nucleotide
  modified_base 24: mod_base = OTHER; note = 2'-fluoro modified nucleotide
  modified_base 25: mod_base = OTHER; note = 2'-O-methyl modified nucleotide
  modified_base 26: mod_base = OTHER; note = 2'-O-methyl modified nucleotide
  modified_base 27: mod_base = OTHER; note = 2'-O-methyl modified nucleotide
  modified_base 28: mod_base = OTHER; note = 2'-O-methyl modified nucleotide
  modified_base 29: mod_base = OTHER; note = 2'-O-methyl modified nucleotide
  modified_base 30: mod_base = OTHER; note = 2'-O-methyl modified nucleotide
  modified_base 31: mod_base = OTHER; note = 2'-O-methyl modified nucleotide
  modified_base 32: mod_base = OTHER; note = 2'-O-methyl modified nucleotide
  modified_base 33: mod_base = OTHER; note = 2'-O-methyl modified nucleotide
  misc_difference 34: note = 2'-O-methyl modified nucleotide may be trivalent N-acetylgalactosamine modified
ncatgctgtacactgcctgcagtgtacagcatga

SEQ ID NO: 1581 - RNA, 34 nt, synthetic construct
  source 1..34: mol_type = other RNA
  misc_difference 1: note = 2'-O-methyl modified nucleotide may be 5' phosphate modified
  modified_base 2: mod_base = OTHER; note = 2'-fluoro modified nucleotide
  modified_base 3: mod_base = OTHER; note = 2'-O-methyl modified nucleotide
  modified_base 4: mod_base = OTHER; note = 2'-O-methyl modified nucleotide
  modified_base 5: mod_base = OTHER; note = 2'-O-methyl modified nucleotide
  modified_base 6: mod_base = OTHER; note = 2'-O-methyl modified nucleotide
  modified_base 7: mod_base = OTHER; note = 2'-O-methyl modified nucleotide
  modified_base 8: mod_base = OTHER; note = 2'-O-methyl modified nucleotide
  modified_base 9: mod_base = OTHER; note = 2'-O-methyl modified nucleotide
  modified_base 10: mod_base = OTHER; note = 2'-O-methyl modified nucleotide
  modified_base 11: mod_base = OTHER; note = 2'-O-methyl modified nucleotide
  modified_base 12: mod_base = OTHER; note = 2'-O-methyl modified nucleotide
  modified_base 13: mod_base = OTHER; note = 2'-O-methyl modified nucleotide
  modified_base 14: mod_base = OTHER; note = 2'-fluoro modified nucleotide
  modified_base 15: mod_base = OTHER; note = 2'-O-methyl modified nucleotide
  modified_base 16: mod_base = OTHER; note = 2'-O-methyl modified nucleotide
  modified_base 17: mod_base = OTHER; note = 2'-O-methyl modified nucleotide
  modified_base 18: mod_base = OTHER; note = 2'-O-methyl modified nucleotide
  modified_base 19: mod_base = OTHER; note = 2'-O-methyl modified nucleotide
  modified_base 20: mod_base = OTHER; note = 2'-O-methyl modified nucleotide
  modified_base 21: mod_base = OTHER; note = 2'-O-methyl modified nucleotide
  modified_base 22: mod_base = OTHER; note = 2'-fluoro modified nucleotide
  modified_base 23: mod_base = OTHER; note = 2'-fluoro modified nucleotide
  modified_base 24: mod_base = OTHER; note = 2'-fluoro modified nucleotide
  modified_base 25: mod_base = OTHER; note = 2'-O-methyl modified nucleotide
  modified_base 26: mod_base = OTHER; note = 2'-O-methyl modified nucleotide
  modified_base 27: mod_base = OTHER; note = 2'-O-methyl modified nucleotide
  modified_base 28: mod_base = OTHER; note = 2'-O-methyl modified nucleotide
  modified_base 29: mod_base = OTHER; note = 2'-O-methyl modified nucleotide
  modified_base 30: mod_base = OTHER; note = 2'-O-methyl modified nucleotide
  modified_base 31: mod_base = OTHER; note = 2'-O-methyl modified nucleotide
  modified_base 32: mod_base = OTHER; note = 2'-O-methyl modified nucleotide
  modified_base 33: mod_base = OTHER; note = 2'-O-methyl modified nucleotide
  misc_difference 34: note = 2'-O-methyl modified nucleotide may be trivalent N-acetylgalactosamine modified
ntgtctttcttggaagccattccaagaaagacaa

SEQ ID NO: 1582 - RNA, 34 nt, synthetic construct
  source 1..34: mol_type = other RNA
  misc_difference 1: note = 2'-O-methyl modified nucleotide may be 5' phosphate modified
  modified_base 2: mod_base = OTHER; note = 2'-fluoro modified nucleotide
  modified_base 3: mod_base = OTHER; note = 2'-O-methyl modified nucleotide
  modified_base 4: mod_base = OTHER; note = 2'-O-methyl modified nucleotide
  modified_base 5: mod_base = OTHER; note = 2'-O-methyl modified nucleotide
  modified_base 6: mod_base = OTHER; note = 2'-O-methyl modified nucleotide
  modified_base 7: mod_base = OTHER; note = 2'-O-methyl modified nucleotide
  modified_base 8: mod_base = OTHER; note = 2'-O-methyl modified nucleotide
  modified_base 9: mod_base = OTHER; note = 2'-O-methyl modified nucleotide
  modified_base 10: mod_base = OTHER; note = 2'-O-methyl modified nucleotide
  modified_base 11: mod_base = OTHER; note = 2'-O-methyl modified nucleotide
  modified_base 12: mod_base = OTHER; note = 2'-O-methyl modified nucleotide
  modified_base 13: mod_base = OTHER; note = 2'-O-methyl modified nucleotide
  modified_base 14: mod_base = OTHER; note = 2'-fluoro modified nucleotide
  modified_base 15: mod_base = OTHER; note = 2'-O-methyl modified nucleotide
  modified_base 16: mod_base = OTHER; note = 2'-O-methyl modified nucleotide
  modified_base 17: mod_base = OTHER; note = 2'-O-methyl modified nucleotide
  modified_base 18: mod_base = OTHER; note = 2'-O-methyl modified nucleotide
  modified_base 19: mod_base = OTHER; note = 2'-O-methyl modified nucleotide
  modified_base 20: mod_base = OTHER; note = 2'-O-methyl modified nucleotide
  modified_base 21: mod_base = OTHER; note = 2'-O-methyl modified nucleotide
  modified_base 22: mod_base = OTHER; note = 2'-fluoro modified nucleotide
  modified_base 23: mod_base = OTHER; note = 2'-fluoro modified nucleotide
  modified_base 24: mod_base = OTHER; note = 2'-fluoro modified nucleotide
  modified_base 25: mod_base = OTHER; note = 2'-O-methyl modified nucleotide
  modified_base 26: mod_base = OTHER; note = 2'-O-methyl modified nucleotide
  modified_base 27: mod_base = OTHER; note = 2'-O-methyl modified nucleotide
  modified_base 28: mod_base = OTHER; note = 2'-O-methyl modified nucleotide
  modified_base 29: mod_base = OTHER; note = 2'-O-methyl modified nucleotide
  modified_base 30: mod_base = OTHER; note = 2'-O-methyl modified nucleotide
  modified_base 31: mod_base = OTHER; note = 2'-O-methyl modified nucleotide
  modified_base 32: mod_base = OTHER; note = 2'-O-methyl modified nucleotide
  modified_base 33: mod_base = OTHER; note = 2'-O-methyl modified nucleotide
  misc_difference 34: note = 2'-O-methyl modified nucleotide may be trivalent N-acetylgalactosamine modified
ncgactccttctatggtctcatagaaggagtcga

SEQ ID NO: 1583 - RNA, 34 nt, synthetic construct
  source 1..34: mol_type = other RNA
  misc_difference 1: note = 2'-O-methyl modified nucleotide may be 5' phosphate modified
  modified_base 2: mod_base = OTHER; note = 2'-fluoro modified nucleotide
  modified_base 3: mod_base = OTHER; note = 2'-O-methyl modified nucleotide
  modified_base 4: mod_base = OTHER; note = 2'-O-methyl modified nucleotide
  modified_base 5: mod_base = OTHER; note = 2'-O-methyl modified nucleotide
  modified_base 6: mod_base = OTHER; note = 2'-O-methyl modified nucleotide
  modified_base 7: mod_base = OTHER; note = 2'-O-methyl modified nucleotide
  modified_base 8: mod_base = OTHER; note = 2'-O-methyl modified nucleotide
  modified_base 9: mod_base = OTHER; note = 2'-O-methyl modified nucleotide
  modified_base 10: mod_base = OTHER; note = 2'-O-methyl modified nucleotide
  modified_base 11: mod_base = OTHER; note = 2'-O-methyl modified nucleotide
  modified_base 12: mod_base = OTHER; note = 2'-O-methyl modified nucleotide
  modified_base 13: mod_base = OTHER; note = 2'-O-methyl modified nucleotide
  modified_base 14: mod_base = OTHER; note = 2'-fluoro modified nucleotide
  modified_base 15: mod_base = OTHER; note = 2'-O-methyl modified nucleotide
  modified_base 16: mod_base = OTHER; note = 2'-O-methyl modified nucleotide
  modified_base 17: mod_base = OTHER; note = 2'-O-methyl modified nucleotide
  modified_base 18: mod_base = OTHER; note = 2'-O-methyl modified nucleotide
  modified_base 19: mod_base = OTHER; note = 2'-O-methyl modified nucleotide
  modified_base 20: mod_base = OTHER; note = 2'-O-methyl modified nucleotide
  modified_base 21: mod_base = OTHER; note = 2'-O-methyl modified nucleotide
  modified_base 22: mod_base = OTHER; note = 2'-fluoro modified nucleotide
  modified_base 23: mod_base = OTHER; note = 2'-fluoro modified nucleotide
  modified_base 24: mod_base = OTHER; note = 2'-fluoro modified nucleotide
  modified_base 25: mod_base = OTHER; note = 2'-O-methyl modified nucleotide
  modified_base 26: mod_base = OTHER; note = 2'-O-methyl modified nucleotide
  modified_base 27: mod_base = OTHER; note = 2'-O-methyl modified nucleotide
  modified_base 28: mod_base = OTHER; note = 2'-O-methyl modified nucleotide
  modified_base 29: mod_base = OTHER; note = 2'-O-methyl modified nucleotide
  modified_base 30: mod_base = OTHER; note = 2'-O-methyl modified nucleotide
  modified_base 31: mod_base = OTHER; note = 2'-O-methyl modified nucleotide
  modified_base 32: mod_base = OTHER; note = 2'-O-methyl modified nucleotide
  modified_base 33: mod_base = OTHER; note = 2'-O-methyl modified nucleotide
  misc_difference 34: note = 2'-O-methyl modified nucleotide may be trivalent N-acetylgalactosamine modified
ngacatccagataatcctcattatctggatgtca

SEQ ID NO: 1584 - RNA, 34 nt, synthetic construct
  source 1..34: mol_type = other RNA
  misc_difference 1: note = 2'-O-methyl modified nucleotide may be 5' phosphate modified
  modified_base 2: mod_base = OTHER; note = 2'-fluoro modified nucleotide
  modified_base 3: mod_base = OTHER; note = 2'-O-methyl modified nucleotide
  modified_base 4: mod_base = OTHER; note = 2'-O-methyl modified nucleotide
  modified_base 5: mod_base = OTHER; note = 2'-O-methyl modified nucleotide
  modified_base 6: mod_base = OTHER; note = 2'-O-methyl modified nucleotide
  modified_base 7: mod_base = OTHER; note = 2'-O-methyl modified nucleotide
  modified_base 8: mod_base = OTHER; note = 2'-O-methyl modified nucleotide
  modified_base 9: mod_base = OTHER; note = 2'-O-methyl modified nucleotide
  modified_base 10: mod_base = OTHER; note = 2'-O-methyl modified nucleotide
  modified_base 11: mod_base = OTHER; note = 2'-O-methyl modified nucleotide
  modified_base 12: mod_base = OTHER; note = 2'-O-methyl modified nucleotide
  modified_base 13: mod_base = OTHER; note = 2'-O-methyl modified nucleotide
  modified_base 14: mod_base = OTHER; note = 2'-fluoro modified nucleotide
  modified_base 15: mod_base = OTHER; note = 2'-O-methyl modified nucleotide
  modified_base 16: mod_base = OTHER; note = 2'-O-methyl modified nucleotide
  modified_base 17: mod_base = OTHER; note = 2'-O-methyl modified nucleotide
  modified_base 18: mod_base = OTHER; note = 2'-O-methyl modified nucleotide
  modified_base 19: mod_base = OTHER; note = 2'-O-methyl modified nucleotide
  modified_base 20: mod_base = OTHER; note = 2'-O-methyl modified nucleotide
  modified_base 21: mod_base = OTHER; note = 2'-O-methyl modified nucleotide
  modified_base 22: mod_base = OTHER; note = 2'-fluoro modified nucleotide
  modified_base 23: mod_base = OTHER; note = 2'-fluoro modified nucleotide
  modified_base 24: mod_base = OTHER; note = 2'-fluoro modified nucleotide
  modified_base 25: mod_base = OTHER; note = 2'-O-methyl modified nucleotide
  modified_base 26: mod_base = OTHER; note = 2'-O-methyl modified nucleotide
  modified_base 27: mod_base = OTHER; note = 2'-O-methyl modified nucleotide
  modified_base 28: mod_base = OTHER; note = 2'-O-methyl modified nucleotide
  modified_base 29: mod_base = OTHER; note = 2'-O-methyl modified nucleotide
  modified_base 30: mod_base = OTHER; note = 2'-O-methyl modified nucleotide
  modified_base 31: mod_base = OTHER; note = 2'-O-methyl modified nucleotide
  modified_base 32: mod_base = OTHER; note = 2'-O-methyl modified nucleotide
  modified_base 33: mod_base = OTHER; note = 2'-O-methyl modified nucleotide
  misc_difference 34: note = 2'-O-methyl modified nucleotide may be trivalent N-acetylgalactosamine modified
ntgagatcttggcctgccaaggccaagatctcaa

SEQ ID NO: 1585 - RNA, 34 nt, synthetic construct
  source 1..34: mol_type = other RNA
  misc_difference 1: note = 2'-O-methyl modified nucleotide may be 5' phosphate modified
  modified_base 2: mod_base = OTHER; note = 2'-fluoro modified nucleotide
  modified_base 3: mod_base = OTHER; note = 2'-O-methyl modified nucleotide
  modified_base 4: mod_base = OTHER; note = 2'-O-methyl modified nucleotide
  modified_base 5: mod_base = OTHER; note = 2'-O-methyl modified nucleotide
  modified_base 6: mod_base = OTHER; note = 2'-O-methyl modified nucleotide
  modified_base 7: mod_base = OTHER; note = 2'-O-methyl modified nucleotide
  modified_base 8: mod_base = OTHER; note = 2'-O-methyl modified nucleotide
  modified_base 9: mod_base = OTHER; note = 2'-O-methyl modified nucleotide
  modified_base 10: mod_base = OTHER; note = 2'-O-methyl modified nucleotide
  modified_base 11: mod_base = OTHER; note = 2'-O-methyl modified nucleotide
  modified_base 12: mod_base = OTHER; note = 2'-O-methyl modified nucleotide
  modified_base 13: mod_base = OTHER; note = 2'-O-methyl modified nucleotide
  modified_base 14: mod_base = OTHER; note = 2'-fluoro modified nucleotide
  modified_base 15: mod_base = OTHER; note = 2'-O-methyl modified nucleotide
  modified_base 16: mod_base = OTHER; note = 2'-O-methyl modified nucleotide
  modified_base 17: mod_base = OTHER; note = 2'-O-methyl modified nucleotide
  modified_base 18: mod_base = OTHER; note = 2'-O-methyl modified nucleotide
  modified_base 19: mod_base = OTHER; note = 2'-O-methyl modified nucleotide
  modified_base 20: mod_base = OTHER; note = 2'-O-methyl modified nucleotide
  modified_base 21: mod_base = OTHER; note = 2'-O-methyl modified nucleotide
  modified_base 22: mod_base = OTHER; note = 2'-fluoro modified nucleotide
  modified_base 23: mod_base = OTHER; note = 2'-fluoro modified nucleotide
  modified_base 24: mod_base = OTHER; note = 2'-fluoro modified nucleotide
  modified_base 25: mod_base = OTHER; note = 2'-O-methyl modified nucleotide
  modified_base 26: mod_base = OTHER; note = 2'-O-methyl modified nucleotide
  modified_base 27: mod_base = OTHER; note = 2'-O-methyl modified nucleotide
  modified_base 28: mod_base = OTHER; note = 2'-O-methyl modified nucleotide
  modified_base 29: mod_base = OTHER; note = 2'-O-methyl modified nucleotide
  modified_base 30: mod_base = OTHER; note = 2'-O-methyl modified nucleotide
  modified_base 31: mod_base = OTHER; note = 2'-O-methyl modified nucleotide
  modified_base 32: mod_base = OTHER; note = 2'-O-methyl modified nucleotide
  modified_base 33: mod_base = OTHER; note = 2'-O-methyl modified nucleotide
  misc_difference 34: note = 2'-O-methyl modified nucleotide may be trivalent N-acetylgalactosamine modified
nacgctgtcttcaaggcggcttgaagacagcgta

SEQ ID NO: 1586 - RNA, 34 nt, synthetic construct
  source 1..34: mol_type = other RNA
  misc_difference 1: note = 2'-O-methyl modified nucleotide may be 5' phosphate modified
  modified_base 2: mod_base = OTHER; note = 2'-fluoro modified nucleotide
  modified_base 3: mod_base = OTHER; note = 2'-O-methyl modified nucleotide
  modified_base 4: mod_base = OTHER; note = 2'-O-methyl modified nucleotide
  modified_base 5: mod_base = OTHER; note = 2'-O-methyl modified nucleotide
  modified_base 6: mod_base = OTHER; note = 2'-O-methyl modified nucleotide
  modified_base 7: mod_base = OTHER; note = 2'-O-methyl modified nucleotide
  modified_base 8: mod_base = OTHER; note = 2'-O-methyl modified nucleotide
  modified_base 9: mod_base = OTHER; note = 2'-O-methyl modified nucleotide
  modified_base 10: mod_base = OTHER; note = 2'-O-methyl modified nucleotide
  modified_base 11: mod_base = OTHER; note = 2'-O-methyl modified nucleotide
  modified_base 12: mod_base = OTHER; note = 2'-O-methyl modified nucleotide
  modified_base 13: mod_base = OTHER; note = 2'-O-methyl modified nucleotide
  modified_base 14: mod_base = OTHER; note = 2'-fluoro modified nucleotide
  modified_base 15: mod_base = OTHER; note = 2'-O-methyl modified nucleotide
  modified_base 16: mod_base = OTHER; note = 2'-O-methyl modified nucleotide
  modified_base 17: mod_base = OTHER; note = 2'-O-methyl modified nucleotide
  modified_base 18: mod_base = OTHER; note = 2'-O-methyl modified nucleotide
  modified_base 19: mod_base = OTHER; note = 2'-O-methyl modified nucleotide
  modified_base 20: mod_base = OTHER; note = 2'-O-methyl modified nucleotide
  modified_base 21: mod_base = OTHER; note = 2'-O-methyl modified nucleotide
  modified_base 22: mod_base = OTHER; note = 2'-fluoro modified nucleotide
  modified_base 23: mod_base = OTHER; note = 2'-fluoro modified nucleotide
  modified_base 24: mod_base = OTHER; note = 2'-fluoro modified nucleotide
  modified_base 25: mod_base = OTHER; note = 2'-O-methyl modified nucleotide
  modified_base 26: mod_base = OTHER; note = 2'-O-methyl modified nucleotide
  modified_base 27: mod_base = OTHER; note = 2'-O-methyl modified nucleotide
  modified_base 28: mod_base = OTHER; note = 2'-O-methyl modified nucleotide
  modified_base 29: mod_base = OTHER; note = 2'-O-methyl modified nucleotide
  modified_base 30: mod_base = OTHER; note = 2'-O-methyl modified nucleotide
  modified_base 31: mod_base = OTHER; note = 2'-O-methyl modified nucleotide
  modified_base 32: mod_base = OTHER; note = 2'-O-methyl modified nucleotide
  modified_base 33: mod_base = OTHER; note = 2'-O-methyl modified nucleotide
  misc_difference 34: note = 2'-O-methyl modified nucleotide may be trivalent N-acetylgalactosamine modified
nagacaggaaagcttcggcaagctttcctgtcta

SEQ ID NO: 1587 - RNA, 34 nt, synthetic construct
  source 1..34: mol_type = other RNA
  misc_difference 1: note = 2'-O-methyl modified nucleotide may be 5' phosphate modified
  modified_base 2: mod_base = OTHER; note = 2'-fluoro modified nucleotide
  modified_base 3: mod_base = OTHER; note = 2'-O-methyl modified nucleotide
  modified_base 4: mod_base = OTHER; note = 2'-O-methyl modified nucleotide
  modified_base 5: mod_base = OTHER; note = 2'-O-methyl modified nucleotide
  modified_base 6: mod_base = OTHER; note = 2'-O-methyl modified nucleotide
  modified_base 7: mod_base = OTHER; note = 2'-O-methyl modified nucleotide
  modified_base 8: mod_base = OTHER; note = 2'-O-methyl modified nucleotide
  modified_base 9: mod_base = OTHER; note = 2'-O-methyl modified nucleotide
  modified_base 10: mod_base = OTHER; note = 2'-O-methyl modified nucleotide
  modified_base 11: mod_base = OTHER; note = 2'-O-methyl modified nucleotide
  modified_base 12: mod_base = OTHER; note = 2'-O-methyl modified nucleotide
  modified_base 13: mod_base = OTHER; note = 2'-O-methyl modified nucleotide
  modified_base 14: mod_base = OTHER; note = 2'-fluoro modified nucleotide
  modified_base 15: mod_base = OTHER; note = 2'-O-methyl modified nucleotide
  modified_base 16: mod_base = OTHER; note = 2'-O-methyl modified nucleotide
  modified_base 17: mod_base = OTHER; note = 2'-O-methyl modified nucleotide
  modified_base 18: mod_base = OTHER; note = 2'-O-methyl modified nucleotide
  modified_base 19: mod_base = OTHER; note = 2'-O-methyl modified nucleotide
  modified_base 20: mod_base = OTHER; note = 2'-O-methyl modified nucleotide
  modified_base 21: mod_base = OTHER; note = 2'-O-methyl modified nucleotide
  modified_base 22: mod_base = OTHER; note = 2'-fluoro modified nucleotide
  modified_base 23: mod_base = OTHER; note = 2'-fluoro modified nucleotide
  modified_base 24: mod_base = OTHER; note = 2'-fluoro modified nucleotide
  modified_base 25: mod_base = OTHER; note = 2'-O-methyl modified nucleotide
  modified_base 26: mod_base = OTHER; note = 2'-O-methyl modified nucleotide
  modified_base 27: mod_base = OTHER; note = 2'-O-methyl modified nucleotide
  modified_base 28: mod_base = OTHER; note = 2'-O-methyl modified nucleotide
  modified_base 29: mod_base = OTHER; note = 2'-O-methyl modified nucleotide
  modified_base 30: mod_base = OTHER; note = 2'-O-methyl modified nucleotide
  modified_base 31: mod_base = OTHER; note = 2'-O-methyl modified nucleotide
  modified_base 32: mod_base = OTHER; note = 2'-O-methyl modified nucleotide
  modified_base 33: mod_base = OTHER; note = 2'-O-methyl modified nucleotide
  misc_difference 34: note = 2'-O-methyl modified nucleotide may be trivalent N-acetylgalactosamine modified
nttgaacacatgttgctcacaacatgtgttcaaa

SEQ ID NO: 1588 - RNA, 34 nt, synthetic construct
  source 1..34: mol_type = other RNA
  misc_difference 1: note = 2'-O-methyl modified nucleotide may be 5' phosphate modified
  modified_base 2: mod_base = OTHER; note = 2'-fluoro modified nucleotide
  modified_base 3: mod_base = OTHER; note = 2'-O-methyl modified nucleotide
  modified_base 4: mod_base = OTHER; note = 2'-O-methyl modified nucleotide
  modified_base 5: mod_base = OTHER; note = 2'-O-methyl modified nucleotide
  modified_base 6: mod_base = OTHER; note = 2'-O-methyl modified nucleotide
  modified_base 7: mod_base = OTHER; note = 2'-O-methyl modified nucleotide
  modified_base 8: mod_base = OTHER; note = 2'-O-methyl modified nucleotide
  modified_base 9: mod_base = OTHER; note = 2'-O-methyl modified nucleotide
  modified_base 10: mod_base = OTHER; note = 2'-O-methyl modified nucleotide
  modified_base 11: mod_base = OTHER; note = 2'-O-methyl modified nucleotide
  modified_base 12: mod_base = OTHER; note = 2'-O-methyl modified nucleotide
  modified_base 13: mod_base = OTHER; note = 2'-O-methyl modified nucleotide
  modified_base 14: mod_base = OTHER; note = 2'-fluoro modified nucleotide
  modified_base 15: mod_base = OTHER; note = 2'-O-methyl modified nucleotide
  modified_base 16: mod_base = OTHER; note = 2'-O-methyl modified nucleotide
  modified_base 17: mod_base = OTHER; note = 2'-O-methyl modified nucleotide
  modified_base 18: mod_base = OTHER; note = 2'-O-methyl modified nucleotide
  modified_base 19: mod_base = OTHER; note = 2'-O-methyl modified nucleotide
  modified_base 20: mod_base = OTHER; note = 2'-O-methyl modified nucleotide
  modified_base 21: mod_base = OTHER; note = 2'-O-methyl modified nucleotide
  modified_base 22: mod_base = OTHER; note = 2'-fluoro modified nucleotide
  modified_base 23: mod_base = OTHER; note = 2'-fluoro modified nucleotide
  modified_base 24: mod_base = OTHER; note = 2'-fluoro modified nucleotide
  modified_base 25: mod_base = OTHER; note = 2'-O-methyl modified nucleotide
  modified_base 26: mod_base = OTHER; note = 2'-O-methyl modified nucleotide
  modified_base 27: mod_base = OTHER; note = 2'-O-methyl modified nucleotide
  modified_base 28: mod_base = OTHER; note = 2'-O-methyl modified nucleotide
  modified_base 29: mod_base = OTHER; note = 2'-O-methyl modified nucleotide
  modified_base 30: mod_base = OTHER; note = 2'-O-methyl modified nucleotide
  modified_base 31: mod_base = OTHER; note = 2'-O-methyl modified nucleotide
  modified_base 32: mod_base = OTHER; note = 2'-O-methyl modified nucleotide
  modified_base 33: mod_base = OTHER; note = 2'-O-methyl modified nucleotide
  misc_difference 34: note = 2'-O-methyl modified nucleotide may be trivalent N-acetylgalactosamine modified
nataaaattcaggaattccttcctgaattttata

SEQ ID NO: 1589 - RNA, 34 nt, synthetic construct
  source 1..34: mol_type = other RNA
  misc_difference 1: note = 2'-O-methyl modified nucleotide may be 5' phosphate modified
  modified_base 2: mod_base = OTHER; note = 2'-fluoro modified nucleotide
  modified_base 3: mod_base = OTHER; note = 2'-O-methyl modified nucleotide
  modified_base 4: mod_base = OTHER; note = 2'-O-methyl modified nucleotide
  modified_base 5: mod_base = OTHER; note = 2'-O-methyl modified nucleotide
  modified_base 6: mod_base = OTHER; note = 2'-O-methyl modified nucleotide
  modified_base 7: mod_base = OTHER; note = 2'-O-methyl modified nucleotide
  modified_base 8: mod_base = OTHER; note = 2'-O-methyl modified nucleotide
  modified_base 9: mod_base = OTHER; note = 2'-O-methyl modified nucleotide
  modified_base 10: mod_base = OTHER; note = 2'-O-methyl modified nucleotide
  modified_base 11: mod_base = OTHER; note = 2'-O-methyl modified nucleotide
  modified_base 12: mod_base = OTHER; note = 2'-O-methyl modified nucleotide
  modified_base 13: mod_base = OTHER; note = 2'-O-methyl modified nucleotide
  modified_base 14: mod_base = OTHER; note = 2'-fluoro modified nucleotide
  modified_base 15: mod_base = OTHER; note = 2'-O-methyl modified nucleotide
  modified_base 16: mod_base = OTHER; note = 2'-O-methyl modified nucleotide
  modified_base 17: mod_base = OTHER; note = 2'-O-methyl modified nucleotide
  modified_base 18: mod_base = OTHER; note = 2'-O-methyl modified nucleotide
  modified_base 19: mod_base = OTHER; note = 2'-O-methyl modified nucleotide
  modified_base 20: mod_base = OTHER; note = 2'-O-methyl modified nucleotide
  modified_base 21: mod_base = OTHER; note = 2'-O-methyl modified nucleotide
  modified_base 22: mod_base = OTHER; note = 2'-fluoro modified nucleotide
  modified_base 23: mod_base = OTHER; note = 2'-fluoro modified nucleotide
  modified_base 24: mod_base = OTHER; note = 2'-fluoro modified nucleotide
  modified_base 25: mod_base = OTHER; note = 2'-O-methyl modified nucleotide
  modified_base 26: mod_base = OTHER; note = 2'-O-methyl modified nucleotide
  modified_base 27: mod_base = OTHER; note = 2'-O-methyl modified nucleotide
  modified_base 28: mod_base = OTHER; note = 2'-O-methyl modified nucleotide
  modified_base 29: mod_base = OTHER; note = 2'-O-methyl modified nucleotide
  modified_base 30: mod_base = OTHER; note = 2'-O-methyl modified nucleotide
  modified_base 31: mod_base = OTHER; note = 2'-O-methyl modified nucleotide
  modified_base 32: mod_base = OTHER; note = 2'-O-methyl modified nucleotide
  modified_base 33: mod_base = OTHER; note = 2'-O-methyl modified nucleotide
  misc_difference 34: note = 2'-O-methyl modified nucleotide may be trivalent N-acetylgalactosamine modified
ncccaaatcctcatcttgggatgaggatttggga

SEQ ID NO: 1590 - RNA, 34 nt, synthetic construct
  source 1..34: mol_type = other RNA
  misc_difference 1: note = 2'-O-methyl modified nucleotide may be 5' phosphate modified
  modified_base 2: mod_base = OTHER; note = 2'-fluoro modified nucleotide
  modified_base 3: mod_base = OTHER; note = 2'-O-methyl modified nucleotide
  modified_base 4: mod_base = OTHER; note = 2'-O-methyl modified nucleotide
  modified_base 5: mod_base = OTHER; note = 2'-O-methyl modified nucleotide
  modified_base 6: mod_base = OTHER; note = 2'-O-methyl modified nucleotide
  modified_base 7: mod_base = OTHER; note = 2'-O-methyl modified nucleotide
  modified_base 8: mod_base = OTHER; note = 2'-O-methyl modified nucleotide
  modified_base 9: mod_base = OTHER; note = 2'-O-methyl modified nucleotide
  modified_base 10: mod_base = OTHER; note = 2'-O-methyl modified nucleotide
  modified_base 11: mod_base = OTHER; note = 2'-O-methyl modified nucleotide
  modified_base 12: mod_base = OTHER; note = 2'-O-methyl modified nucleotide
  modified_base 13: mod_base = OTHER; note = 2'-O-methyl modified nucleotide
  modified_base 14: mod_base = OTHER; note = 2'-fluoro modified nucleotide
  modified_base 15: mod_base = OTHER; note = 2'-O-methyl modified nucleotide
  modified_base 16: mod_base = OTHER; note = 2'-O-methyl modified nucleotide
  modified_base 17: mod_base = OTHER; note = 2'-O-methyl modified nucleotide
  modified_base 18: mod_base = OTHER; note = 2'-O-methyl modified nucleotide
  modified_base 19: mod_base = OTHER; note = 2'-O-methyl modified nucleotide
  modified_base 20: mod_base = OTHER; note = 2'-O-methyl modified nucleotide
  modified_base 21: mod_base = OTHER; note = 2'-O-methyl modified nucleotide
  modified_base 22: mod_base = OTHER; note = 2'-fluoro modified nucleotide
  modified_base 23: mod_base = OTHER; note = 2'-fluoro modified nucleotide
  modified_base 24: mod_base = OTHER; note = 2'-fluoro modified nucleotide
  modified_base 25: mod_base = OTHER; note = 2'-O-methyl modified nucleotide
  modified_base 26: mod_base = OTHER; note = 2'-O-methyl modified nucleotide
  modified_base 27: mod_base = OTHER; note = 2'-O-methyl modified nucleotide
  modified_base 28: mod_base = OTHER; note = 2'-O-methyl modified nucleotide
  modified_base 29: mod_base = OTHER; note = 2'-O-methyl modified nucleotide
  modified_base 30: mod_base = OTHER; note = 2'-O-methyl modified nucleotide
  modified_base 31: mod_base = OTHER; note = 2'-O-methyl modified nucleotide
  modified_base 32: mod_base = OTHER; note = 2'-O-methyl modified nucleotide
  modified_base 33: mod_base = OTHER; note = 2'-O-methyl modified nucleotide
  misc_difference 34: note = 2'-O-methyl modified nucleotide may be trivalent N-acetylgalactosamine modified
naagagatctcatcactcatgatgagatctctta

SEQ ID NO: 1591 - RNA, 34 nt, synthetic construct
  source 1..34: mol_type = other RNA
  misc_difference 1: note = 2'-O-methyl modified nucleotide may be 5' phosphate modified
  modified_base 2: mod_base = OTHER; note = 2'-fluoro modified nucleotide
  modified_base 3: mod_base = OTHER; note = 2'-O-methyl modified nucleotide
  modified_base 4: mod_base = OTHER; note = 2'-O-methyl modified nucleotide
  modified_base 5: mod_base = OTHER; note = 2'-O-methyl modified nucleotide
  modified_base 6: mod_base = OTHER; note = 2'-O-methyl modified nucleotide
  modified_base 7: mod_base = OTHER; note = 2'-O-methyl modified nucleotide
  modified_base 8: mod_base = OTHER; note = 2'-O-methyl modified nucleotide
  modified_base 9: mod_base = OTHER; note = 2'-O-methyl modified nucleotide
  modified_base 10: mod_base = OTHER; note = 2'-O-methyl modified nucleotide
  modified_base 11: mod_base = OTHER; note = 2'-O-methyl modified nucleotide
  modified_base 12: mod_base = OTHER; note = 2'-O-methyl modified nucleotide
  modified_base 13: mod_base = OTHER; note = 2'-O-methyl modified nucleotide
  modified_base 14: mod_base = OTHER; note = 2'-fluoro modified nucleotide
  modified_base 15: mod_base = OTHER; note = 2'-O-methyl modified nucleotide
  modified_base 16: mod_base = OTHER; note = 2'-O-methyl modified nucleotide
  modified_base 17: mod_base = OTHER; note = 2'-O-methyl modified nucleotide
  modified_base 18: mod_base = OTHER; note = 2'-O-methyl modified nucleotide
  modified_base 19: mod_base = OTHER; note = 2'-O-methyl modified nucleotide
  modified_base 20: mod_base = OTHER; note = 2'-O-methyl modified nucleotide
  modified_base 21: mod_base = OTHER; note = 2'-O-methyl modified nucleotide
  modified_base 22: mod_base = OTHER; note = 2'-fluoro modified nucleotide
  modified_base 23: mod_base = OTHER; note = 2'-fluoro modified nucleotide
  modified_base 24: mod_base = OTHER; note = 2'-fluoro modified nucleotide
  modified_base 25: mod_base = OTHER; note = 2'-O-methyl modified nucleotide
  modified_base 26: mod_base = OTHER; note = 2'-O-methyl modified nucleotide
  modified_base 27: mod_base = OTHER; note = 2'-O-methyl modified nucleotide
  modified_base 28: mod_base = OTHER; note = 2'-O-methyl modified nucleotide
  modified_base 29: mod_base = OTHER; note = 2'-O-methyl modified nucleotide
  modified_base 30: mod_base = OTHER; note = 2'-O-methyl modified nucleotide
  modified_base 31: mod_base = OTHER; note = 2'-O-methyl modified nucleotide
  modified_base 32: mod_base = OTHER; note = 2'-O-methyl modified nucleotide
  modified_base 33: mod_base = OTHER; note = 2'-O-methyl modified nucleotide
  misc_difference 34: note = 2'-O-methyl modified nucleotide may be trivalent N-acetylgalactosamine modified
naaagcattgatgttcactaacatcaatgcttta

SEQ ID NO: 1592 - RNA, 34 nt, synthetic construct
  source 1..34: mol_type = other RNA
  misc_difference 1: note = 2'-O-methyl modified nucleotide may be 5' phosphate modified
  modified_base 2: mod_base = OTHER; note = 2'-fluoro modified nucleotide
  modified_base 3: mod_base = OTHER; note = 2'-O-methyl modified nucleotide
  modified_base 4: mod_base = OTHER; note = 2'-O-methyl modified nucleotide
  modified_base 5: mod_base = OTHER; note = 2'-O-methyl modified nucleotide
  modified_base 6: mod_base = OTHER; note = 2'-O-methyl modified nucleotide
  modified_base 7: mod_base = OTHER; note = 2'-O-methyl modified nucleotide
  modified_base 8: mod_base = OTHER; note = 2'-O-methyl modified nucleotide
  modified_base 9: mod_base = OTHER; note = 2'-O-methyl modified nucleotide
  modified_base 10: mod_base = OTHER; note = 2'-O-methyl modified nucleotide
  modified_base 11: mod_base = OTHER; note = 2'-O-methyl modified nucleotide
  modified_base 12: mod_base = OTHER; note = 2'-O-methyl modified nucleotide
  modified_base 13: mod_base = OTHER; note = 2'-O-methyl modified nucleotide
  modified_base 14: mod_base = OTHER; note = 2'-fluoro modified nucleotide
  modified_base 15: mod_base = OTHER; note = 2'-O-methyl modified nucleotide
  modified_base 16: mod_base = OTHER; note = 2'-O-methyl modified nucleotide
  modified_base 17: mod_base = OTHER; note = 2'-O-methyl modified nucleotide
  modified_base 18: mod_base = OTHER; note = 2'-O-methyl modified nucleotide
  modified_base 19: mod_base = OTHER; note = 2'-O-methyl modified nucleotide
  modified_base 20: mod_base = OTHER; note = 2'-O-methyl modified nucleotide
  modified_base 21: mod_base = OTHER; note = 2'-O-methyl modified nucleotide
  modified_base 22: mod_base = OTHER; note = 2'-fluoro modified nucleotide
  modified_base 23: mod_base = OTHER; note = 2'-fluoro modified nucleotide
  modified_base 24: mod_base = OTHER; note = 2'-fluoro modified nucleotide
  modified_base 25: mod_base = OTHER; note = 2'-O-methyl modified nucleotide
  modified_base 26: mod_base = OTHER; note = 2'-O-methyl modified nucleotide
  modified_base 27: mod_base = OTHER; note = 2'-O-methyl modified nucleotide
  modified_base 28: mod_base = OTHER; note = 2'-O-methyl modified nucleotide
  modified_base 29: mod_base = OTHER; note = 2'-O-methyl modified nucleotide
  modified_base 30: mod_base = OTHER; note = 2'-O-methyl modified nucleotide
  modified_base 31: mod_base = OTHER; note = 2'-O-methyl modified nucleotide
  modified_base 32: mod_base = OTHER; note = 2'-O-methyl modified nucleotide
  modified_base 33: mod_base = OTHER; note = 2'-O-methyl modified nucleotide
  misc_difference 34: note = 2'-O-methyl modified nucleotide may be trivalent N-acetylgalactosamine modified
naggaattcctgcttctttaagcaggaattccta

SEQ ID NO: 1593 - RNA, 34 nt, synthetic construct
  source 1..34: mol_type = other RNA
  misc_difference 1: note = 2'-O-methyl modified nucleotide may be 5' phosphate modified
  modified_base 2: mod_base = OTHER; note = 2'-fluoro modified nucleotide
  modified_base 3: mod_base = OTHER; note = 2'-O-methyl modified nucleotide
  modified_base 4: mod_base = OTHER; note = 2'-O-methyl modified nucleotide
  modified_base 5: mod_base = OTHER; note = 2'-O-methyl modified nucleotide
  modified_base 6: mod_base = OTHER; note = 2'-O-methyl modified nucleotide
  modified_base 7: mod_base = OTHER; note = 2'-O-methyl modified nucleotide
  modified_base 8: mod_base = OTHER; note = 2'-O-methyl modified nucleotide
  modified_base 9: mod_base = OTHER; note = 2'-O-methyl modified nucleotide
  modified_base 10: mod_base = OTHER; note = 2'-O-methyl modified nucleotide
  modified_base 11: mod_base = OTHER; note = 2'-O-methyl modified nucleotide
  modified_base 12: mod_base = OTHER; note = 2'-O-methyl modified nucleotide
  modified_base 13: mod_base = OTHER; note = 2'-O-methyl modified nucleotide
  modified_base 14: mod_base = OTHER; note = 2'-fluoro modified nucleotide
  modified_base 15: mod_base = OTHER; note = 2'-O-methyl modified nucleotide
  modified_base 16: mod_base = OTHER; note = 2'-O-methyl modified nucleotide
  modified_base 17: mod_base = OTHER; note = 2'-O-methyl modified nucleotide
  modified_base 18: mod_base = OTHER; note = 2'-O-methyl modified nucleotide
  modified_base 19: mod_base = OTHER; note = 2'-O-methyl modified nucleotide
  modified_base 20: mod_base = OTHER; note = 2'-O-methyl modified nucleotide
  modified_base 21: mod_base = OTHER; note = 2'-O-methyl modified nucleotide
  modified_base 22: mod_base = OTHER; note = 2'-fluoro modified nucleotide
  modified_base 23: mod_base = OTHER; note = 2'-fluoro modified nucleotide
  modified_base 24: mod_base = OTHER; note = 2'-fluoro modified nucleotide
  modified_base 25: mod_base = OTHER; note = 2'-O-methyl modified nucleotide
  modified_base 26: mod_base = OTHER; note = 2'-O-methyl modified nucleotide
  modified_base 27: mod_base = OTHER; note = 2'-O-methyl modified nucleotide
  modified_base 28: mod_base = OTHER; note = 2'-O-methyl modified nucleotide
  modified_base 29: mod_base = OTHER; note = 2'-O-methyl modified nucleotide
  modified_base 30: mod_base = OTHER; note = 2'-O-methyl modified nucleotide
  modified_base 31: mod_base = OTHER; note = 2'-O-methyl modified nucleotide
  modified_base 32: mod_base = OTHER; note = 2'-O-methyl modified nucleotide
  modified_base 33: mod_base = OTHER; note = 2'-O-methyl modified nucleotide
  misc_difference 34: note = 2'-O-methyl modified nucleotide may be trivalent N-acetylgalactosamine modified
natgaaggagtcttggcagcaagactccttcata

SEQ ID NO: 1594 - RNA, 34 nt, synthetic construct
  source 1..34: mol_type = other RNA
  misc_difference 1: note = 2'-O-methyl modified nucleotide may be 5' phosphate modified
  modified_base 2: mod_base = OTHER; note = 2'-fluoro modified nucleotide
  modified_base 3: mod_base = OTHER; note = 2'-O-methyl modified nucleotide
  modified_base 4: mod_base = OTHER; note = 2'-O-methyl modified nucleotide
  modified_base 5: mod_base = OTHER; note = 2'-O-methyl modified nucleotide
  modified_base 6: mod_base = OTHER; note = 2'-O-methyl modified nucleotide
  modified_base 7: mod_base = OTHER; note = 2'-O-methyl modified nucleotide
  modified_base 8: mod_base = OTHER; note = 2'-O-methyl modified nucleotide
  modified_base 9: mod_base = OTHER; note = 2'-O-methyl modified nucleotide
  modified_base 10: mod_base = OTHER; note = 2'-O-methyl modified nucleotide
  modified_base 11: mod_base = OTHER; note = 2'-O-methyl modified nucleotide
  modified_base 12: mod_base = OTHER; note = 2'-O-methyl modified nucleotide
  modified_base 13: mod_base = OTHER; note = 2'-O-methyl modified nucleotide
  modified_base 14: mod_base = OTHER; note = 2'-fluoro modified nucleotide
  modified_base 15: mod_base = OTHER; note = 2'-O-methyl modified nucleotide
  modified_base 16: mod_base = OTHER; note = 2'-O-methyl modified nucleotide
  modified_base 17: mod_base = OTHER; note = 2'-O-methyl modified nucleotide
  modified_base 18: mod_base = OTHER; note = 2'-O-methyl modified nucleotide
  modified_base 19: mod_base = OTHER; note = 2'-O-methyl modified nucleotide
  modified_base 20: mod_base = OTHER; note = 2'-O-methyl modified nucleotide
  modified_base 21: mod_base = OTHER; note = 2'-O-methyl modified nucleotide
  modified_base 22: mod_base = OTHER; note = 2'-fluoro modified nucleotide
  modified_base 23: mod_base = OTHER; note = 2'-fluoro modified nucleotide
  modified_base 24: mod_base = OTHER; note = 2'-fluoro modified nucleotide
  modified_base 25: mod_base = OTHER; note = 2'-O-methyl modified nucleotide
  modified_base 26: mod_base = OTHER; note = 2'-O-methyl modified nucleotide
  modified_base 27: mod_base = OTHER; note = 2'-O-methyl modified nucleotide
  modified_base 28: mod_base = OTHER; note = 2'-O-methyl modified nucleotide
  modified_base 29: mod_base = OTHER; note = 2'-O-methyl modified nucleotide
  modified_base 30: mod_base = OTHER; note = 2'-O-methyl modified nucleotide
  modified_base 31: mod_base = OTHER; note = 2'-O-methyl modified nucleotide
  modified_base 32: mod_base = OTHER; note = 2'-O-methyl modified nucleotide
  modified_base 33: mod_base = OTHER; note = 2'-O-methyl modified nucleotide
  misc_difference 34: note = 2'-O-methyl modified nucleotide may be trivalent N-acetylgalactosamine modified
naagcttcggccacctcttggtggccgaagctta

SEQ ID NO: 1595 - RNA, 34 nt, synthetic construct
  source 1..34: mol_type = other RNA
  misc_difference 1: note = 2'-O-methyl modified nucleotide may be 5' phosphate modified
  modified_base 2: mod_base = OTHER; note = 2'-fluoro modified nucleotide
  modified_base 3: mod_base = OTHER; note = 2'-O-methyl modified nucleotide
  modified_base 4: mod_base = OTHER; note = 2'-O-methyl modified nucleotide
  modified_base 5: mod_base = OTHER; note = 2'-O-methyl modified nucleotide
  modified_base 6: mod_base = OTHER; note = 2'-O-methyl modified nucleotide
  modified_base 7: mod_base = OTHER; note = 2'-O-methyl modified nucleotide
  modified_base 8: mod_base = OTHER; note = 2'-O-methyl modified nucleotide
  modified_base 9: mod_base = OTHER; note = 2'-O-methyl modified nucleotide
  modified_base 10: mod_base = OTHER; note = 2'-O-methyl modified nucleotide
  modified_base 11: mod_base = OTHER; note = 2'-O-methyl modified nucleotide
  modified_base 12: mod_base = OTHER; note = 2'-O-methyl modified nucleotide
  modified_base 13: mod_base = OTHER; note = 2'-O-methyl modified nucleotide
  modified_base 14: mod_base = OTHER; note = 2'-fluoro modified nucleotide
  modified_base 15: mod_base = OTHER; note = 2'-O-methyl modified nucleotide
  modified_base 16: mod_base = OTHER; note = 2'-O-methyl modified nucleotide
  modified_base 17: mod_base = OTHER; note = 2'-O-methyl modified nucleotide
  modified_base 18: mod_base = OTHER; note = 2'-O-methyl modified nucleotide
  modified_base 19: mod_base = OTHER; note = 2'-O-methyl modified nucleotide
  modified_base 20: mod_base = OTHER; note = 2'-O-methyl modified nucleotide
  modified_base 21: mod_base = OTHER; note = 2'-O-methyl modified nucleotide
  modified_base 22: mod_base = OTHER; note = 2'-fluoro modified nucleotide
  modified_base 23: mod_base = OTHER; note = 2'-fluoro modified nucleotide
  modified_base 24: mod_base = OTHER; note = 2'-fluoro modified nucleotide
  modified_base 25: mod_base = OTHER; note = 2'-O-methyl modified nucleotide
  modified_base 26: mod_base = OTHER; note = 2'-O-methyl modified nucleotide
  modified_base 27: mod_base = OTHER; note = 2'-O-methyl modified nucleotide
  modified_base 28: mod_base = OTHER; note = 2'-O-methyl modified nucleotide
  modified_base 29: mod_base = OTHER; note = 2'-O-methyl modified nucleotide
  modified_base 30: mod_base = OTHER; note = 2'-O-methyl modified nucleotide
  modified_base 31: mod_base = OTHER; note = 2'-O-methyl modified nucleotide
  modified_base 32: mod_base = OTHER; note = 2'-O-methyl modified nucleotide
  modified_base 33: mod_base = OTHER; note = 2'-O-methyl modified nucleotide
  misc_difference 34: note = 2'-O-methyl modified nucleotide may be trivalent N-acetylgalactosamine modified
ntgactttgtcatagcctgctatgacaaagtcaa

SEQ ID NO: 1596 - RNA, 34 nt, synthetic construct
  source 1..34: mol_type = other RNA
  misc_difference 1: note = 2'-O-methyl modified nucleotide may be 5' phosphate modified
  modified_base 2: mod_base = OTHER; note = 2'-fluoro modified nucleotide
  modified_base 3: mod_base = OTHER; note = 2'-O-methyl modified nucleotide
  modified_base 4: mod_base = OTHER; note = 2'-O-methyl modified nucleotide
  modified_base 5: mod_base = OTHER; note = 2'-O-methyl modified nucleotide
  modified_base 6: mod_base = OTHER; note = 2'-O-methyl modified nucleotide
  modified_base 7: mod_base = OTHER; note = 2'-O-methyl modified nucleotide
  modified_base 8: mod_base = OTHER; note = 2'-O-methyl modified nucleotide
  modified_base 9: mod_base = OTHER; note = 2'-O-methyl modified nucleotide
  modified_base 10: mod_base = OTHER; note = 2'-O-methyl modified nucleotide
  modified_base 11: mod_base = OTHER; note = 2'-O-methyl modified nucleotide
  modified_base 12: mod_base = OTHER; note = 2'-O-methyl modified nucleotide
  modified_base 13: mod_base = OTHER; note = 2'-O-methyl modified nucleotide
  modified_base 14: mod_base = OTHER; note = 2'-fluoro modified nucleotide
  modified_base 15: mod_base = OTHER; note = 2'-O-methyl modified nucleotide
  modified_base 16: mod_base = OTHER; note = 2'-O-methyl modified nucleotide
  modified_base 17: mod_base = OTHER; note = 2'-O-methyl modified nucleotide
  modified_base 18: mod_base = OTHER; note = 2'-O-methyl modified nucleotide
  modified_base 19: mod_base = OTHER; note = 2'-O-methyl modified nucleotide
  modified_base 20: mod_base = OTHER; note = 2'-O-methyl modified nucleotide
  modified_base 21: mod_base = OTHER; note = 2'-O-methyl modified nucleotide
  modified_base 22: mod_base = OTHER; note = 2'-fluoro modified nucleotide
  modified_base 23: mod_base = OTHER; note = 2'-fluoro modified nucleotide
  modified_base 24: mod_base = OTHER; note = 2'-fluoro modified nucleotide
  modified_base 25: mod_base = OTHER; note = 2'-O-methyl modified nucleotide
  modified_base 26: mod_base = OTHER; note = 2'-O-methyl modified nucleotide
  modified_base 27: mod_base = OTHER; note = 2'-O-methyl modified nucleotide
  modified_base 28: mod_base = OTHER; note = 2'-O-methyl modified nucleotide
  modified_base 29: mod_base = OTHER; note = 2'-O-methyl modified nucleotide
  modified_base 30: mod_base = OTHER; note = 2'-O-methyl modified nucleotide
  modified_base 31: mod_base = OTHER; note = 2'-O-methyl modified nucleotide
  modified_base 32: mod_base = OTHER; note = 2'-O-methyl modified nucleotide
  modified_base 33: mod_base = OTHER; note = 2'-O-methyl modified nucleotide
  misc_difference 34: note = 2'-O-methyl modified nucleotide may be trivalent N-acetylgalactosamine modified
ntccaagctgaaactccagagtttcagcttggaa

SEQ ID NO: 1597 - RNA, 34 nt, synthetic construct
  source 1..34: mol_type = other RNA
  misc_difference 1: note = 2'-O-methyl modified nucleotide may be 5' phosphate modified
  modified_base 2: mod_base = OTHER; note = 2'-fluoro modified nucleotide
  modified_base 3: mod_base = OTHER; note = 2'-O-methyl modified nucleotide
  modified_base 4: mod_base = OTHER; note = 2'-O-methyl modified nucleotide
  modified_base 5: mod_base = OTHER; note = 2'-O-methyl modified nucleotide
  modified_base 6: mod_base = OTHER; note = 2'-O-methyl modified nucleotide
  modified_base 7: mod_base = OTHER; note = 2'-O-methyl modified nucleotide
  modified_base 8: mod_base = OTHER; note = 2'-O-methyl modified nucleotide
  modified_base 9: mod_base = OTHER; note = 2'-O-methyl modified nucleotide
  modified_base 10: mod_base = OTHER; note = 2'-O-methyl modified nucleotide
  modified_base 11: mod_base = OTHER; note = 2'-O-methyl modified nucleotide
  modified_base 12: mod_base = OTHER; note = 2'-O-methyl modified nucleotide
  modified_base 13: mod_base = OTHER; note = 2'-O-methyl modified nucleotide
  modified_base 14: mod_base = OTHER; note = 2'-fluoro modified nucleotide
  modified_base 15: mod_base = OTHER; note = 2'-O-methyl modified nucleotide
  modified_base 16: mod_base = OTHER; note = 2'-O-methyl modified nucleotide
  modified_base 17: mod_base = OTHER; note = 2'-O-methyl modified nucleotide
  modified_base 18: mod_base = OTHER; note = 2'-O-methyl modified nucleotide
  modified_base 19: mod_base = OTHER; note = 2'-O-methyl modified nucleotide
  modified_base 20: mod_base = OTHER; note = 2'-O-methyl modified nucleotide
  modified_base 21: mod_base = OTHER; note = 2'-O-methyl modified nucleotide
  modified_base 22: mod_base = OTHER; note = 2'-fluoro modified nucleotide
  modified_base 23: mod_base = OTHER; note = 2'-fluoro modified nucleotide
  modified_base 24: mod_base = OTHER; note = 2'-fluoro modified nucleotide
  modified_base 25: mod_base = OTHER; note = 2'-O-methyl modified nucleotide
  modified_base 26: mod_base = OTHER; note = 2'-O-methyl modified nucleotide
  modified_base 27: mod_base = OTHER; note = 2'-O-methyl modified nucleotide
  modified_base 28: mod_base = OTHER; note = 2'-O-methyl modified nucleotide
  modified_base 29: mod_base = OTHER; note = 2'-O-methyl modified nucleotide
  modified_base 30: mod_base = OTHER; note = 2'-O-methyl modified nucleotide
  modified_base 31: mod_base = OTHER; note = 2'-O-methyl modified nucleotide
  modified_base 32: mod_base = OTHER; note = 2'-O-methyl modified nucleotide
  modified_base 33: mod_base = OTHER; note = 2'-O-methyl modified nucleotide
  misc_difference 34: note = 2'-O-methyl modified nucleotide may be trivalent N-acetylgalactosamine modified
nccaaatcctcatcttggaagatgaggatttgga

SEQ ID NO: 1598 - RNA, 34 nt, synthetic construct
  source 1..34: mol_type = other RNA
  misc_difference 1: note = 2'-O-methyl modified nucleotide may be 5' phosphate modified
  modified_base 2: mod_base = OTHER; note = 2'-fluoro modified nucleotide
  modified_base 3: mod_base = OTHER; note = 2'-O-methyl modified nucleotide
  modified_base 4: mod_base = OTHER; note = 2'-O-methyl modified nucleotide
  modified_base 5: mod_base = OTHER; note = 2'-O-methyl modified nucleotide
  modified_base 6: mod_base = OTHER; note = 2'-O-methyl modified nucleotide
  modified_base 7: mod_base = OTHER; note = 2'-O-methyl modified nucleotide
  modified_base 8: mod_base = OTHER; note = 2'-O-methyl modified nucleotide
  modified_base 9: mod_base = OTHER; note = 2'-O-methyl modified nucleotide
  modified_base 10: mod_base = OTHER; note = 2'-O-methyl modified nucleotide
  modified_base 11: mod_base = OTHER; note = 2'-O-methyl modified nucleotide
  modified_base 12: mod_base = OTHER; note = 2'-O-methyl modified nucleotide
  modified_base 13: mod_base = OTHER; note = 2'-O-methyl modified nucleotide
  modified_base 14: mod_base = OTHER; note = 2'-fluoro modified nucleotide
  modified_base 15: mod_base = OTHER; note = 2'-O-methyl modified nucleotide
  modified_base 16: mod_base = OTHER; note = 2'-O-methyl modified nucleotide
  modified_base 17: mod_base = OTHER; note = 2'-O-methyl modified nucleotide
  modified_base 18: mod_base = OTHER; note = 2'-O-methyl modified nucleotide
  modified_base 19: mod_base = OTHER; note = 2'-O-methyl modified nucleotide
  modified_base 20: mod_base = OTHER; note = 2'-O-methyl modified nucleotide
  modified_base 21: mod_base = OTHER; note = 2'-O-methyl modified nucleotide
  modified_base 22: mod_base = OTHER; note = 2'-fluoro modified nucleotide
  modified_base 23: mod_base = OTHER; note = 2'-fluoro modified nucleotide
  modified_base 24: mod_base = OTHER; note = 2'-fluoro modified nucleotide
  modified_base 25: mod_base = OTHER; note = 2'-O-methyl modified nucleotide
  modified_base 26: mod_base = OTHER; note = 2'-O-methyl modified nucleotide
  modified_base 27: mod_base = OTHER; note = 2'-O-methyl modified nucleotide
  modified_base 28: mod_base = OTHER; note = 2'-O-methyl modified nucleotide
  modified_base 29: mod_base = OTHER; note = 2'-O-methyl modified nucleotide
  modified_base 30: mod_base = OTHER; note = 2'-O-methyl modified nucleotide
  modified_base 31: mod_base = OTHER; note = 2'-O-methyl modified nucleotide
  modified_base 32: mod_base = OTHER; note = 2'-O-methyl modified nucleotide
  modified_base 33: mod_base = OTHER; note = 2'-O-methyl modified nucleotide
  misc_difference 34: note = 2'-O-methyl modified nucleotide may be trivalent N-acetylgalactosamine modified
ncagctgttttaattcaataattaaaacagctga

SEQ ID NO: 1599 - RNA, 34 nt, synthetic construct
  source 1..34: mol_type = other RNA
  misc_difference 1: note = 2'-O-methyl modified nucleotide may be 5' phosphate modified
  modified_base 2: mod_base = OTHER; note = 2'-fluoro modified nucleotide
  modified_base 3: mod_base = OTHER; note = 2'-O-methyl modified nucleotide
  modified_base 4: mod_base = OTHER; note = 2'-O-methyl modified nucleotide
  modified_base 5: mod_base = OTHER; note = 2'-O-methyl modified nucleotide
  modified_base 6: mod_base = OTHER; note = 2'-O-methyl modified nucleotide
  modified_base 7: mod_base = OTHER; note = 2'-O-methyl modified nucleotide
  modified_base 8: mod_base = OTHER; note = 2'-O-methyl modified nucleotide
  modified_base 9: mod_base = OTHER; note = 2'-O-methyl modified nucleotide
  modified_base 10: mod_base = OTHER; note = 2'-O-methyl modified nucleotide
  modified_base 11: mod_base = OTHER; note = 2'-O-methyl modified nucleotide
  modified_base 12: mod_base = OTHER; note = 2'-O-methyl modified nucleotide
  modified_base 13: mod_base = OTHER; note = 2'-O-methyl modified nucleotide
  modified_base 14: mod_base = OTHER; note = 2'-fluoro modified nucleotide
  modified_base 15: mod_base = OTHER; note = 2'-O-methyl modified nucleotide
  modified_base 16: mod_base = OTHER; note = 2'-O-methyl modified nucleotide
  modified_base 17: mod_base = OTHER; note = 2'-O-methyl modified nucleotide
  modified_base 18: mod_base = OTHER; note = 2'-O-methyl modified nucleotide
  modified_base 19: mod_base = OTHER; note = 2'-O-methyl modified nucleotide
  modified_base 20: mod_base = OTHER; note = 2'-O-methyl modified nucleotide
  modified_base 21: mod_base = OTHER; note = 2'-O-methyl modified nucleotide
  modified_base 22: mod_base = OTHER; note = 2'-fluoro modified nucleotide
  modified_base 23: mod_base = OTHER; note = 2'-fluoro modified nucleotide
  modified_base 24: mod_base = OTHER; note = 2'-fluoro modified nucleotide
  modified_base 25: mod_base = OTHER; note = 2'-O-methyl modified nucleotide
  modified_base 26: mod_base = OTHER; note = 2'-O-methyl modified nucleotide
  modified_base 27: mod_base = OTHER; note = 2'-O-methyl modified nucleotide
  modified_base 28: mod_base = OTHER; note = 2'-O-methyl modified nucleotide
  modified_base 29: mod_base = OTHER; note = 2'-O-methyl modified nucleotide
  modified_base 30: mod_base = OTHER; note = 2'-O-methyl modified nucleotide
  modified_base 31: mod_base = OTHER; note = 2'-O-methyl modified nucleotide
  modified_base 32: mod_base = OTHER; note = 2'-O-methyl modified nucleotide
  modified_base 33: mod_base = OTHER; note = 2'-O-methyl modified nucleotide
  misc_difference 34: note = 2'-O-methyl modified nucleotide may be trivalent N-acetylgalactosamine modified
naacgacttctcttgtgaacaagagaagtcgtta

SEQ ID NO: 1600 - RNA, 34 nt, synthetic construct
  source 1..34: mol_type = other RNA
  misc_difference 1: note = 2'-O-methyl modified nucleotide may be 5' phosphate modified
  modified_base 2: mod_base = OTHER; note = 2'-fluoro modified nucleotide
  modified_base 3: mod_base = OTHER; note = 2'-O-methyl modified nucleotide
  modified_base 4: mod_base = OTHER; note = 2'-O-methyl modified nucleotide
  modified_base 5: mod_base = OTHER; note = 2'-O-methyl modified nucleotide
  modified_base 6: mod_base = OTHER; note = 2'-O-methyl modified nucleotide
  modified_base 7: mod_base = OTHER; note = 2'-O-methyl modified nucleotide
  modified_base 8: mod_base = OTHER; note = 2'-O-methyl modified nucleotide
  modified_base 9: mod_base = OTHER; note = 2'-O-methyl modified nucleotide
  modified_base 10: mod_base = OTHER; note = 2'-O-methyl modified nucleotide
  modified_base 11: mod_base = OTHER; note = 2'-O-methyl modified nucleotide
  modified_base 12: mod_base = OTHER; note = 2'-O-methyl modified nucleotide
  modified_base 13: mod_base = OTHER; note = 2'-O-methyl modified nucleotide
  modified_base 14: mod_base = OTHER; note = 2'-fluoro modified nucleotide
  modified_base 15: mod_base = OTHER; note = 2'-O-methyl modified nucleotide
  modified_base 16: mod_base = OTHER; note = 2'-O-methyl modified nucleotide
  modified_base 17: mod_base = OTHER; note = 2'-O-methyl modified nucleotide
  modified_base 18: mod_base = OTHER; note = 2'-O-methyl modified nucleotide
  modified_base 19: mod_base = OTHER; note = 2'-O-methyl modified nucleotide
  modified_base 20: mod_base = OTHER; note = 2'-O-methyl modified nucleotide
  modified_base 21: mod_base = OTHER; note = 2'-O-methyl modified nucleotide
  modified_base 22: mod_base = OTHER; note = 2'-fluoro modified nucleotide
  modified_base 23: mod_base = OTHER; note = 2'-fluoro modified nucleotide
  modified_base 24: mod_base = OTHER; note = 2'-fluoro modified nucleotide
  modified_base 25: mod_base = OTHER; note = 2'-O-methyl modified nucleotide
  modified_base 26: mod_base = OTHER; note = 2'-O-methyl modified nucleotide
  modified_base 27: mod_base = OTHER; note = 2'-O-methyl modified nucleotide
  modified_base 28: mod_base = OTHER; note = 2'-O-methyl modified nucleotide
  modified_base 29: mod_base = OTHER; note = 2'-O-methyl modified nucleotide
  modified_base 30: mod_base = OTHER; note = 2'-O-methyl modified nucleotide
  modified_base 31: mod_base = OTHER; note = 2'-O-methyl modified nucleotide
  modified_base 32: mod_base = OTHER; note = 2'-O-methyl modified nucleotide
  modified_base 33: mod_base = OTHER; note = 2'-O-methyl modified nucleotide
  misc_difference 34: note = 2'-O-methyl modified nucleotide may be trivalent N-acetylgalactosamine modified
nccggaacatccaagcgggcttggatgttccgga

SEQ ID NO: 1601 - RNA, 34 nt, synthetic construct
  source 1..34: mol_type = other RNA
  misc_difference 1: note = 2'-O-methyl modified nucleotide may be 5' phosphate modified
  modified_base 2: mod_base = OTHER; note = 2'-fluoro modified nucleotide
  modified_base 3: mod_base = OTHER; note = 2'-O-methyl modified nucleotide
  modified_base 4: mod_base = OTHER; note = 2'-O-methyl modified nucleotide
  modified_base 5: mod_base = OTHER; note = 2'-O-methyl modified nucleotide
  modified_base 6: mod_base = OTHER; note = 2'-O-methyl modified nucleotide
  modified_base 7: mod_base = OTHER; note = 2'-O-methyl modified nucleotide
  modified_base 8: mod_base = OTHER; note = 2'-O-methyl modified nucleotide
  modified_base 9: mod_base = OTHER; note = 2'-O-methyl modified nucleotide
  modified_base 10: mod_base = OTHER; note = 2'-O-methyl modified nucleotide
  modified_base 11: mod_base = OTHER; note = 2'-O-methyl modified nucleotide
  modified_base 12: mod_base = OTHER; note = 2'-O-methyl modified nucleotide
  modified_base 13: mod_base = OTHER; note = 2'-O-methyl modified nucleotide
  modified_base 14: mod_base = OTHER; note = 2'-fluoro modified nucleotide
  modified_base 15: mod_base = OTHER; note = 2'-O-methyl modified nucleotide
  modified_base 16: mod_base = OTHER; note = 2'-O-methyl modified nucleotide
  modified_base 17: mod_base = OTHER; note = 2'-O-methyl modified nucleotide
  modified_base 18: mod_base = OTHER; note = 2'-O-methyl modified nucleotide
  modified_base 19: mod_base = OTHER; note = 2'-O-methyl modified nucleotide
  modified_base 20: mod_base = OTHER; note = 2'-O-methyl modified nucleotide
  modified_base 21: mod_base = OTHER; note = 2'-O-methyl modified nucleotide
  modified_base 22: mod_base = OTHER; note = 2'-fluoro modified nucleotide
  modified_base 23: mod_base = OTHER; note = 2'-fluoro modified nucleotide
  modified_base 24: mod_base = OTHER; note = 2'-fluoro modified nucleotide
  modified_base 25: mod_base = OTHER; note = 2'-O-methyl modified nucleotide
  modified_base 26: mod_base = OTHER; note = 2'-O-methyl modified nucleotide
  modified_base 27: mod_base = OTHER; note = 2'-O-methyl modified nucleotide
  modified_base 28: mod_base = OTHER; note = 2'-O-methyl modified nucleotide
  modified_base 29: mod_base = OTHER; note = 2'-O-methyl modified nucleotide
  modified_base 30: mod_base = OTHER; note = 2'-O-methyl modified nucleotide
  modified_base 31: mod_base = OTHER; note = 2'-O-methyl modified nucleotide
  modified_base 32: mod_base = OTHER; note = 2'-O-methyl modified nucleotide
  modified_base 33: mod_base = OTHER; note = 2'-O-methyl modified nucleotide
  misc_difference 34: note = 2'-O-methyl modified nucleotide may be trivalent N-acetylgalactosamine modified
ncaaacacatagacatccatgtctatgtgtttga

SEQ ID NO: 1602 - RNA, 34 nt, synthetic construct
  source 1..34: mol_type = other RNA
  misc_difference 1: note = 2'-O-methyl modified nucleotide may be 5' phosphate modified
  modified_base 2: mod_base = OTHER; note = 2'-fluoro modified nucleotide
  modified_base 3: mod_base = OTHER; note = 2'-O-methyl modified nucleotide
  modified_base 4: mod_base = OTHER; note = 2'-O-methyl modified nucleotide
  modified_base 5: mod_base = OTHER; note = 2'-O-methyl modified nucleotide
  modified_base 6: mod_base = OTHER; note = 2'-O-methyl modified nucleotide
  modified_base 7: mod_base = OTHER; note = 2'-O-methyl modified nucleotide
  modified_base 8: mod_base = OTHER; note = 2'-O-methyl modified nucleotide
  modified_base 9: mod_base = OTHER; note = 2'-O-methyl modified nucleotide
  modified_base 10: mod_base = OTHER; note = 2'-O-methyl modified nucleotide
  modified_base 11: mod_base = OTHER; note = 2'-O-methyl modified nucleotide
  modified_base 12: mod_base = OTHER; note = 2'-O-methyl modified nucleotide
  modified_base 13: mod_base = OTHER; note = 2'-O-methyl modified nucleotide
  modified_base 14: mod_base = OTHER; note = 2'-fluoro modified nucleotide
  modified_base 15: mod_base = OTHER; note = 2'-O-methyl modified nucleotide
  modified_base 16: mod_base = OTHER; note = 2'-O-methyl modified nucleotide
  modified_base 17: mod_base = OTHER; note = 2'-O-methyl modified nucleotide
  modified_base 18: mod_base = OTHER; note = 2'-O-methyl modified nucleotide
  modified_base 19: mod_base = OTHER; note = 2'-O-methyl modified nucleotide
  modified_base 20: mod_base = OTHER; note = 2'-O-methyl modified nucleotide
  modified_base 21: mod_base = OTHER; note = 2'-O-methyl modified nucleotide
  modified_base 22: mod_base = OTHER; note = 2'-fluoro modified nucleotide
  modified_base 23: mod_base = OTHER; note = 2'-fluoro modified nucleotide
  modified_base 24: mod_base = OTHER; note = 2'-fluoro modified nucleotide
  modified_base 25: mod_base = OTHER; note = 2'-O-methyl modified nucleotide
  modified_base 26: mod_base = OTHER; note = 2'-O-methyl modified nucleotide
  modified_base 27: mod_base = OTHER; note = 2'-O-methyl modified nucleotide
  modified_base 28: mod_base = OTHER; note = 2'-O-methyl modified nucleotide
  modified_base 29: mod_base = OTHER; note = 2'-O-methyl modified nucleotide
  modified_base 30: mod_base = OTHER; note = 2'-O-methyl modified nucleotide
  modified_base 31: mod_base = OTHER; note = 2'-O-methyl modified nucleotide
  modified_base 32: mod_base = OTHER; note = 2'-O-methyl modified nucleotide
  modified_base 33: mod_base = OTHER; note = 2'-O-methyl modified nucleotide
  misc_difference 34: note = 2'-O-methyl modified nucleotide may be trivalent N-acetylgalactosamine modified
nttcacaccataacttgccagttatggtgtgaaa

SEQ ID NO: 1603 - RNA, 34 nt, synthetic construct
  source 1..34: mol_type = other RNA
  misc_difference 1: note = 2'-O-methyl modified nucleotide may be 5' phosphate modified
  modified_base 2: mod_base = OTHER; note = 2'-fluoro modified nucleotide
  modified_base 3: mod_base = OTHER; note = 2'-O-methyl modified nucleotide
  modified_base 4: mod_base = OTHER; note = 2'-O-methyl modified nucleotide
  modified_base 5: mod_base = OTHER; note = 2'-O-methyl modified nucleotide
  modified_base 6: mod_base = OTHER; note = 2'-O-methyl modified nucleotide
  modified_base 7: mod_base = OTHER; note = 2'-O-methyl modified nucleotide
  modified_base 8: mod_base = OTHER; note = 2'-O-methyl modified nucleotide
  modified_base 9: mod_base = OTHER; note = 2'-O-methyl modified nucleotide
  modified_base 10: mod_base = OTHER; note = 2'-O-methyl modified nucleotide
  modified_base 11: mod_base = OTHER; note = 2'-O-methyl modified nucleotide
  modified_base 12: mod_base = OTHER; note = 2'-O-methyl modified nucleotide
  modified_base 13: mod_base = OTHER; note = 2'-O-methyl modified nucleotide
  modified_base 14: mod_base = OTHER; note = 2'-fluoro modified nucleotide
  modified_base 15: mod_base = OTHER; note = 2'-O-methyl modified nucleotide
  modified_base 16: mod_base = OTHER; note = 2'-O-methyl modified nucleotide
  modified_base 17: mod_base = OTHER; note = 2'-O-methyl modified nucleotide
  modified_base 18: mod_base = OTHER; note = 2'-O-methyl modified nucleotide
  modified_base 19: mod_base = OTHER; note = 2'-O-methyl modified nucleotide
  modified_base 20: mod_base = OTHER; note = 2'-O-methyl modified nucleotide
  modified_base 21: mod_base = OTHER; note = 2'-O-methyl modified nucleotide
  modified_base 22: mod_base = OTHER; note = 2'-fluoro modified nucleotide
  modified_base 23: mod_base = OTHER; note = 2'-fluoro modified nucleotide
  modified_base 24: mod_base = OTHER; note = 2'-fluoro modified nucleotide
  modified_base 25: mod_base = OTHER; note = 2'-O-methyl modified nucleotide
  modified_base 26: mod_base = OTHER; note = 2'-O-methyl modified nucleotide
  modified_base 27: mod_base = OTHER; note = 2'-O-methyl modified nucleotide
  modified_base 28: mod_base = OTHER; note = 2'-O-methyl modified nucleotide
  modified_base 29: mod_base = OTHER; note = 2'-O-methyl modified nucleotide
  modified_base 30: mod_base = OTHER; note = 2'-O-methyl modified nucleotide
  modified_base 31: mod_base = OTHER; note = 2'-O-methyl modified nucleotide
  modified_base 32: mod_base = OTHER; note = 2'-O-methyl modified nucleotide
  modified_base 33: mod_base = OTHER; note = 2'-O-methyl modified nucleotide
  misc_difference 34: note = 2'-O-methyl modified nucleotide may be trivalent N-acetylgalactosamine modified
ntctcttgtgaactatcaatagttcacaagagaa

SEQ ID NO: 1604 - RNA, 34 nt, synthetic construct
  source 1..34: mol_type = other RNA
  misc_difference 1: note = 2'-O-methyl modified nucleotide may be 5' phosphate modified
  modified_base 2: mod_base = OTHER; note = 2'-fluoro modified nucleotide
  modified_base 3: mod_base = OTHER; note = 2'-O-methyl modified nucleotide
  modified_base 4: mod_base = OTHER; note = 2'-O-methyl modified nucleotide
  modified_base 5: mod_base = OTHER; note = 2'-O-methyl modified nucleotide
  modified_base 6: mod_base = OTHER; note = 2'-O-methyl modified nucleotide
  modified_base 7: mod_base = OTHER; note = 2'-O-methyl modified nucleotide
  modified_base 8: mod_base = OTHER; note = 2'-O-methyl modified nucleotide
  modified_base 9: mod_base = OTHER; note = 2'-O-methyl modified nucleotide
  modified_base 10: mod_base = OTHER; note = 2'-O-methyl modified nucleotide
  modified_base 11: mod_base = OTHER; note = 2'-O-methyl modified nucleotide
  modified_base 12: mod_base = OTHER; note = 2'-O-methyl modified nucleotide
  modified_base 13: mod_base = OTHER; note = 2'-O-methyl modified nucleotide
  modified_base 14: mod_base = OTHER; note = 2'-fluoro modified nucleotide
  modified_base 15: mod_base = OTHER; note = 2'-O-methyl modified nucleotide
  modified_base 16: mod_base = OTHER; note = 2'-O-methyl modified nucleotide
  modified_base 17: mod_base = OTHER; note = 2'-O-methyl modified nucleotide
  modified_base 18: mod_base = OTHER; note = 2'-O-methyl modified nucleotide
  modified_base 19: mod_base = OTHER; note = 2'-O-methyl modified nucleotide
  modified_base 20: mod_base = OTHER; note = 2'-O-methyl modified nucleotide
  modified_base 21: mod_base = OTHER; note = 2'-O-methyl modified nucleotide
  modified_base 22: mod_base = OTHER; note = 2'-fluoro modified nucleotide
  modified_base 23: mod_base = OTHER; note = 2'-fluoro modified nucleotide
  modified_base 24: mod_base = OTHER; note = 2'-fluoro modified nucleotide
  modified_base 25: mod_base = OTHER; note = 2'-O-methyl modified nucleotide
  modified_base 26: mod_base = OTHER; note = 2'-O-methyl modified nucleotide
  modified_base 27: mod_base = OTHER; note = 2'-O-methyl modified nucleotide
  modified_base 28: mod_base = OTHER; note = 2'-O-methyl modified nucleotide
  modified_base 29: mod_base = OTHER; note = 2'-O-methyl modified nucleotide
  modified_base 30: mod_base = OTHER; note = 2'-O-methyl modified nucleotide
  modified_base 31: mod_base = OTHER; note = 2'-O-methyl modified nucleotide
  modified_base 32: mod_base = OTHER; note = 2'-O-methyl modified nucleotide
  modified_base 33: mod_base = OTHER; note = 2'-O-methyl modified nucleotide
  misc_difference 34: note = 2'-O-methyl modified nucleotide may be trivalent N-acetylgalactosamine modified
nattcaggaattcctgcttaggaattcctgaata

SEQ ID NO: 1605 - RNA, 34 nt, synthetic construct
  source 1..34: mol_type = other RNA
  misc_difference 1: note = 2'-O-methyl modified nucleotide may be 5' phosphate modified
  modified_base 2: mod_base = OTHER; note = 2'-fluoro modified nucleotide
  modified_base 3: mod_base = OTHER; note = 2'-O-methyl modified nucleotide
  modified_base 4: mod_base = OTHER; note = 2'-O-methyl modified nucleotide
  modified_base 5: mod_base = OTHER; note = 2'-O-methyl modified nucleotide
  modified_base 6: mod_base = OTHER; note = 2'-O-methyl modified nucleotide
  modified_base 7: mod_base = OTHER; note = 2'-O-methyl modified nucleotide
  modified_base 8: mod_base = OTHER; note = 2'-O-methyl modified nucleotide
  modified_base 9: mod_base = OTHER; note = 2'-O-methyl modified nucleotide
  modified_base 10: mod_base = OTHER; note = 2'-O-methyl modified nucleotide
  modified_base 11: mod_base = OTHER; note = 2'-O-methyl modified nucleotide
  modified_base 12: mod_base = OTHER; note = 2'-O-methyl modified nucleotide
  modified_base 13: mod_base = OTHER; note = 2'-O-methyl modified nucleotide
  modified_base 14: mod_base = OTHER; note = 2'-fluoro modified nucleotide
  modified_base 15: mod_base = OTHER; note = 2'-O-methyl modified nucleotide
  modified_base 16: mod_base = OTHER; note = 2'-O-methyl modified nucleotide
  modified_base 17: mod_base = OTHER; note = 2'-O-methyl modified nucleotide
  modified_base 18: mod_base = OTHER; note = 2'-O-methyl modified nucleotide
  modified_base 19: mod_base = OTHER; note = 2'-O-methyl modified nucleotide
  modified_base 20: mod_base = OTHER; note = 2'-O-methyl modified nucleotide
  modified_base 21: mod_base = OTHER; note = 2'-O-methyl modified nucleotide
  modified_base 22: mod_base = OTHER; note = 2'-fluoro modified nucleotide
  modified_base 23: mod_base = OTHER; note = 2'-fluoro modified nucleotide
  modified_base 24: mod_base = OTHER; note = 2'-fluoro modified nucleotide
  modified_base 25: mod_base = OTHER; note = 2'-O-methyl modified nucleotide
  modified_base 26: mod_base = OTHER; note = 2'-O-methyl modified nucleotide
  modified_base 27: mod_base = OTHER; note = 2'-O-methyl modified nucleotide
  modified_base 28: mod_base = OTHER; note = 2'-O-methyl modified nucleotide
  modified_base 29: mod_base = OTHER; note = 2'-O-methyl modified nucleotide
  modified_base 30: mod_base = OTHER; note = 2'-O-methyl modified nucleotide
  modified_base 31: mod_base = OTHER; note = 2'-O-methyl modified nucleotide
  modified_base 32: mod_base = OTHER; note = 2'-O-methyl modified nucleotide
  modified_base 33: mod_base = OTHER; note = 2'-O-methyl modified nucleotide
  misc_difference 34: note = 2'-O-methyl modified nucleotide may be trivalent N-acetylgalactosamine modified
ngacactttgacccaaatttgggtcaaagtgtca

SEQ ID NO: 1606 - RNA, 34 nt, synthetic construct
  source 1..34: mol_type = other RNA
  misc_difference 1: note = 2'-O-methyl modified nucleotide may be 5' phosphate modified
  modified_base 2: mod_base = OTHER; note = 2'-fluoro modified nucleotide
  modified_base 3: mod_base = OTHER; note = 2'-O-methyl modified nucleotide
  modified_base 4: mod_base = OTHER; note = 2'-O-methyl modified nucleotide
  modified_base 5: mod_base = OTHER; note = 2'-O-methyl modified nucleotide
  modified_base 6: mod_base = OTHER; note = 2'-O-methyl modified nucleotide
  modified_base 7: mod_base = OTHER; note = 2'-O-methyl modified nucleotide
  modified_base 8: mod_base = OTHER; note = 2'-O-methyl modified nucleotide
  modified_base 9: mod_base = OTHER; note = 2'-O-methyl modified nucleotide
  modified_base 10: mod_base = OTHER; note = 2'-O-methyl modified nucleotide
  modified_base 11: mod_base = OTHER; note = 2'-O-methyl modified nucleotide
  modified_base 12: mod_base = OTHER; note = 2'-O-methyl modified nucleotide
  modified_base 13: mod_base = OTHER; note = 2'-O-methyl modified nucleotide
  modified_base 14: mod_base = OTHER; note = 2'-fluoro modified nucleotide
  modified_base 15: mod_base = OTHER; note = 2'-O-methyl modified nucleotide
  modified_base 16: mod_base = OTHER; note = 2'-O-methyl modified nucleotide
  modified_base 17: mod_base = OTHER; note = 2'-O-methyl modified nucleotide
  modified_base 18: mod_base = OTHER; note = 2'-O-methyl modified nucleotide
  modified_base 19: mod_base = OTHER; note = 2'-O-methyl modified nucleotide
  modified_base 20: mod_base = OTHER; note = 2'-O-methyl modified nucleotide
  modified_base 21: mod_base = OTHER; note = 2'-O-methyl modified nucleotide
  modified_base 22: mod_base = OTHER; note = 2'-fluoro modified nucleotide
  modified_base 23: mod_base = OTHER; note = 2'-fluoro modified nucleotide
  modified_base 24: mod_base = OTHER; note = 2'-fluoro modified nucleotide
  modified_base 25: mod_base = OTHER; note = 2'-O-methyl modified nucleotide
  modified_base 26: mod_base = OTHER; note = 2'-O-methyl modified nucleotide
  modified_base 27: mod_base = OTHER; note = 2'-O-methyl modified nucleotide
  modified_base 28: mod_base = OTHER; note = 2'-O-methyl modified nucleotide
  modified_base 29: mod_base = OTHER; note = 2'-O-methyl modified nucleotide
  modified_base 30: mod_base = OTHER; note = 2'-O-methyl modified nucleotide
  modified_base 31: mod_base = OTHER; note = 2'-O-methyl modified nucleotide
  modified_base 32: mod_base = OTHER; note = 2'-O-methyl modified nucleotide
  modified_base 33: mod_base = OTHER; note = 2'-O-methyl modified nucleotide
  misc_difference 34: note = 2'-O-methyl modified nucleotide may be trivalent N-acetylgalactosamine modified
ncacaaacagagctttgataagctctgtttgtga

SEQ ID NO: 1607 - RNA, 34 nt, synthetic construct
  source 1..34: mol_type = other RNA
  misc_difference 1: note = 2'-O-methyl modified nucleotide may be 5' phosphate modified
  modified_base 2: mod_base = OTHER; note = 2'-fluoro modified nucleotide
  modified_base 3: mod_base = OTHER; note = 2'-O-methyl modified nucleotide
  modified_base 4: mod_base = OTHER; note = 2'-O-methyl modified nucleotide
  modified_base 5: mod_base = OTHER; note = 2'-O-methyl modified nucleotide
  modified_base 6: mod_base = OTHER; note = 2'-O-methyl modified nucleotide
  modified_base 7: mod_base = OTHER; note = 2'-O-methyl modified nucleotide
  modified_base 8: mod_base = OTHER; note = 2'-O-methyl modified nucleotide
  modified_base 9: mod_base = OTHER; note = 2'-O-methyl modified nucleotide
  modified_base 10: mod_base = OTHER; note = 2'-O-methyl modified nucleotide
  modified_base 11: mod_base = OTHER; note = 2'-O-methyl modified nucleotide
  modified_base 12: mod_base = OTHER; note = 2'-O-methyl modified nucleotide
  modified_base 13: mod_base = OTHER; note = 2'-O-methyl modified nucleotide
  modified_base 14: mod_base = OTHER; note = 2'-fluoro modified nucleotide
  modified_base 15: mod_base = OTHER; note = 2'-O-methyl modified nucleotide
  modified_base 16: mod_base = OTHER; note = 2'-O-methyl modified nucleotide
  modified_base 17: mod_base = OTHER; note = 2'-O-methyl modified nucleotide
  modified_base 18: mod_base = OTHER; note = 2'-O-methyl modified nucleotide
  modified_base 19: mod_base = OTHER; note = 2'-O-methyl modified nucleotide
  modified_base 20: mod_base = OTHER; note = 2'-O-methyl modified nucleotide
  modified_base 21: mod_base = OTHER; note = 2'-O-methyl modified nucleotide
  modified_base 22: mod_base = OTHER; note = 2'-fluoro modified nucleotide
  modified_base 23: mod_base = OTHER; note = 2'-fluoro modified nucleotide
  modified_base 24: mod_base = OTHER; note = 2'-fluoro modified nucleotide
  modified_base 25: mod_base = OTHER; note = 2'-O-methyl modified nucleotide
  modified_base 26: mod_base = OTHER; note = 2'-O-methyl modified nucleotide
  modified_base 27: mod_base = OTHER; note = 2'-O-methyl modified nucleotide
  modified_base 28: mod_base = OTHER; note = 2'-O-methyl modified nucleotide
  modified_base 29: mod_base = OTHER; note = 2'-O-methyl modified nucleotide
  modified_base 30: mod_base = OTHER; note = 2'-O-methyl modified nucleotide
  modified_base 31: mod_base = OTHER; note = 2'-O-methyl modified nucleotide
  modified_base 32: mod_base = OTHER; note = 2'-O-methyl modified nucleotide
  modified_base 33: mod_base = OTHER; note = 2'-O-methyl modified nucleotide
  misc_difference 34: note = 2'-O-methyl modified nucleotide may be trivalent N-acetylgalactosamine modified
ncaaacagagctttgatatcaaagctctgtttga

SEQ ID NO: 1608 - RNA, 34 nt, synthetic construct
  source 1..34: mol_type = other RNA
  misc_difference 1: note = 2'-O-methyl modified nucleotide may be 5' phosphate modified
  modified_base 2: mod_base = OTHER; note = 2'-fluoro modified nucleotide
  modified_base 3: mod_base = OTHER; note = 2'-O-methyl modified nucleotide
  modified_base 4: mod_base = OTHER; note = 2'-O-methyl modified nucleotide
  modified_base 5: mod_base = OTHER; note = 2'-O-methyl modified nucleotide
  modified_base 6: mod_base = OTHER; note = 2'-O-methyl modified nucleotide
  modified_base 7: mod_base = OTHER; note = 2'-O-methyl modified nucleotide
  modified_base 8: mod_base = OTHER; note = 2'-O-methyl modified nucleotide
  modified_base 9: mod_base = OTHER; note = 2'-O-methyl modified nucleotide
  modified_base 10: mod_base = OTHER; note = 2'-O-methyl modified nucleotide
  modified_base 11: mod_base = OTHER; note = 2'-O-methyl modified nucleotide
  modified_base 12: mod_base = OTHER; note = 2'-O-methyl modified nucleotide
  modified_base 13: mod_base = OTHER; note = 2'-O-methyl modified nucleotide
  modified_base 14: mod_base = OTHER; note = 2'-fluoro modified nucleotide
  modified_base 15: mod_base = OTHER; note = 2'-O-methyl modified nucleotide
  modified_base 16: mod_base = OTHER; note = 2'-O-methyl modified nucleotide
  modified_base 17: mod_base = OTHER; note = 2'-O-methyl modified nucleotide
  modified_base 18: mod_base = OTHER; note = 2'-O-methyl modified nucleotide
  modified_base 19: mod_base = OTHER; note = 2'-O-methyl modified nucleotide
  modified_base 20: mod_base = OTHER; note = 2'-O-methyl modified nucleotide
  modified_base 21: mod_base = OTHER; note = 2'-O-methyl modified nucleotide
  modified_base 22: mod_base = OTHER; note = 2'-fluoro modified nucleotide
  modified_base 23: mod_base = OTHER; note = 2'-fluoro modified nucleotide
  modified_base 24: mod_base = OTHER; note = 2'-fluoro modified nucleotide
  modified_base 25: mod_base = OTHER; note = 2'-O-methyl modified nucleotide
  modified_base 26: mod_base = OTHER; note = 2'-O-methyl modified nucleotide
  modified_base 27: mod_base = OTHER; note = 2'-O-methyl modified nucleotide
  modified_base 28: mod_base = OTHER; note = 2'-O-methyl modified nucleotide
  modified_base 29: mod_base = OTHER; note = 2'-O-methyl modified nucleotide
  modified_base 30: mod_base = OTHER; note = 2'-O-methyl modified nucleotide
  modified_base 31: mod_base = OTHER; note = 2'-O-methyl modified nucleotide
  modified_base 32: mod_base = OTHER; note = 2'-O-methyl modified nucleotide
  modified_base 33: mod_base = OTHER; note = 2'-O-methyl modified nucleotide
  misc_difference 34: note = 2'-O-methyl modified nucleotide may be trivalent N-acetylgalactosamine modified
nttggagtttctccttcagaggagaaactccaaa

SEQ ID NO: 1609 - RNA, 34 nt, synthetic construct
  source 1..34: mol_type = other RNA
  misc_difference 1: note = 2'-O-methyl modified nucleotide may be 5' phosphate modified
  modified_base 2: mod_base = OTHER; note = 2'-fluoro modified nucleotide
  modified_base 3: mod_base = OTHER; note = 2'-O-methyl modified nucleotide
  modified_base 4: mod_base = OTHER; note = 2'-O-methyl modified nucleotide
  modified_base 5: mod_base = OTHER; note = 2'-O-methyl modified nucleotide
  modified_base 6: mod_base = OTHER; note = 2'-O-methyl modified nucleotide
  modified_base 7: mod_base = OTHER; note = 2'-O-methyl modified nucleotide
  modified_base 8: mod_base = OTHER; note = 2'-O-methyl modified nucleotide
  modified_base 9: mod_base = OTHER; note = 2'-O-methyl modified nucleotide
  modified_base 10: mod_base = OTHER; note = 2'-O-methyl modified nucleotide
  modified_base 11: mod_base = OTHER; note = 2'-O-methyl modified nucleotide
  modified_base 12: mod_base = OTHER; note = 2'-O-methyl modified nucleotide
  modified_base 13: mod_base = OTHER; note = 2'-O-methyl modified nucleotide
  modified_base 14: mod_base = OTHER; note = 2'-fluoro modified nucleotide
  modified_base 15: mod_base = OTHER; note = 2'-O-methyl modified nucleotide
  modified_base 16: mod_base = OTHER; note = 2'-O-methyl modified nucleotide
  modified_base 17: mod_base = OTHER; note = 2'-O-methyl modified nucleotide
  modified_base 18: mod_base = OTHER; note = 2'-O-methyl modified nucleotide
  modified_base 19: mod_base = OTHER; note = 2'-O-methyl modified nucleotide
  modified_base 20: mod_base = OTHER; note = 2'-O-methyl modified nucleotide
  modified_base 21: mod_base = OTHER; note = 2'-O-methyl modified nucleotide
  modified_base 22: mod_base = OTHER; note = 2'-fluoro modified nucleotide
  modified_base 23: mod_base = OTHER; note = 2'-fluoro modified nucleotide
  modified_base 24: mod_base = OTHER; note = 2'-fluoro modified nucleotide
  modified_base 25: mod_base = OTHER; note = 2'-O-methyl modified nucleotide
  modified_base 26: mod_base = OTHER; note = 2'-O-methyl modified nucleotide
  modified_base 27: mod_base = OTHER; note = 2'-O-methyl modified nucleotide
  modified_base 28: mod_base = OTHER; note = 2'-O-methyl modified nucleotide
  modified_base 29: mod_base = OTHER; note = 2'-O-methyl modified nucleotide
  modified_base 30: mod_base = OTHER; note = 2'-O-methyl modified nucleotide
  modified_base 31: mod_base = OTHER; note = 2'-O-methyl modified nucleotide
  modified_base 32: mod_base = OTHER; note = 2'-O-methyl modified nucleotide
  modified_base 33: mod_base = OTHER; note = 2'-O-methyl modified nucleotide
  misc_difference 34: note = 2'-O-methyl modified nucleotide may be trivalent N-acetylgalactosamine modified
ntcacaccataacttgccaaagttatggtgtgaa

SEQ ID NO: 1610 - RNA, 34 nt, synthetic construct
  source 1..34: mol_type = other RNA
  misc_difference 1: note = 2'-O-methyl modified nucleotide may be 5' phosphate modified
  modified_base 2: mod_base = OTHER; note = 2'-fluoro modified nucleotide
  modified_base 3: mod_base = OTHER; note = 2'-O-methyl modified nucleotide
  modified_base 4: mod_base = OTHER; note = 2'-O-methyl modified nucleotide
  modified_base 5: mod_base = OTHER; note = 2'-O-methyl modified nucleotide
  modified_base 6: mod_base = OTHER; note = 2'-O-methyl modified nucleotide
  modified_base 7: mod_base = OTHER; note = 2'-O-methyl modified nucleotide
  modified_base 8: mod_base = OTHER; note = 2'-O-methyl modified nucleotide
  modified_base 9: mod_base = OTHER; note = 2'-O-methyl modified nucleotide
  modified_base 10: mod_base = OTHER; note = 2'-O-methyl modified nucleotide
  modified_base 11: mod_base = OTHER; note = 2'-O-methyl modified nucleotide
  modified_base 12: mod_base = OTHER; note = 2'-O-methyl modified nucleotide
  modified_base 13: mod_base = OTHER; note = 2'-O-methyl modified nucleotide
  modified_base 14: mod_base = OTHER; note = 2'-fluoro modified nucleotide
  modified_base 15: mod_base = OTHER; note = 2'-O-methyl modified nucleotide
  modified_base 16: mod_base = OTHER; note = 2'-O-methyl modified nucleotide
  modified_base 17: mod_base = OTHER; note = 2'-O-methyl modified nucleotide
  modified_base 18: mod_base = OTHER; note = 2'-O-methyl modified nucleotide
  modified_base 19: mod_base = OTHER; note = 2'-O-methyl modified nucleotide
  modified_base 20: mod_base = OTHER; note = 2'-O-methyl modified nucleotide
  modified_base 21: mod_base = OTHER; note = 2'-O-methyl modified nucleotide
  modified_base 22: mod_base = OTHER; note = 2'-fluoro modified nucleotide
  modified_base 23: mod_base = OTHER; note = 2'-fluoro modified nucleotide
  modified_base 24: mod_base = OTHER; note = 2'-fluoro modified nucleotide
  modified_base 25: mod_base = OTHER; note = 2'-O-methyl modified nucleotide
  modified_base 26: mod_base = OTHER; note = 2'-O-methyl modified nucleotide
  modified_base 27: mod_base = OTHER; note = 2'-O-methyl modified nucleotide
  modified_base 28: mod_base = OTHER; note = 2'-O-methyl modified nucleotide
  modified_base 29: mod_base = OTHER; note = 2'-O-methyl modified nucleotide
  modified_base 30: mod_base = OTHER; note = 2'-O-methyl modified nucleotide
  modified_base 31: mod_base = OTHER; note = 2'-O-methyl modified nucleotide
  modified_base 32: mod_base = OTHER; note = 2'-O-methyl modified nucleotide
  modified_base 33: mod_base = OTHER; note = 2'-O-methyl modified nucleotide
  misc_difference 34: note = 2'-O-methyl modified nucleotide may be trivalent N-acetylgalactosamine modified
ntgaatgaaacgacttctcagtcgtttcattcaa

SEQ ID NO: 1611 - RNA, 34 nt, synthetic construct
  source 1..34: mol_type = other RNA
  misc_difference 1: note = 2'-O-methyl modified nucleotide may be 5' phosphate modified
  modified_base 2: mod_base = OTHER; note = 2'-fluoro modified nucleotide
  modified_base 3: mod_base = OTHER; note = 2'-O-methyl modified nucleotide
  modified_base 4: mod_base = OTHER; note = 2'-O-methyl modified nucleotide
  modified_base 5: mod_base = OTHER; note = 2'-O-methyl modified nucleotide
  modified_base 6: mod_base = OTHER; note = 2'-O-methyl modified nucleotide
  modified_base 7: mod_base = OTHER; note = 2'-O-methyl modified nucleotide
  modified_base 8: mod_base = OTHER; note = 2'-O-methyl modified nucleotide
  modified_base 9: mod_base = OTHER; note = 2'-O-methyl modified nucleotide
  modified_base 10: mod_base = OTHER; note = 2'-O-methyl modified nucleotide
  modified_base 11: mod_base = OTHER; note = 2'-O-methyl modified nucleotide
  modified_base 12: mod_base = OTHER; note = 2'-O-methyl modified nucleotide
  modified_base 13: mod_base = OTHER; note = 2'-O-methyl modified nucleotide
  modified_base 14: mod_base = OTHER; note = 2'-fluoro modified nucleotide
  modified_base 15: mod_base = OTHER; note = 2'-O-methyl modified nucleotide
  modified_base 16: mod_base = OTHER; note = 2'-O-methyl modified nucleotide
  modified_base 17: mod_base = OTHER; note = 2'-O-methyl modified nucleotide
  modified_base 18: mod_base = OTHER; note = 2'-O-methyl modified nucleotide
  modified_base 19: mod_base = OTHER; note = 2'-O-methyl modified nucleotide
  modified_base 20: mod_base = OTHER; note = 2'-O-methyl modified nucleotide
  modified_base 21: mod_base = OTHER; note = 2'-O-methyl modified nucleotide
  modified_base 22: mod_base = OTHER; note = 2'-fluoro modified nucleotide
  modified_base 23: mod_base = OTHER; note = 2'-fluoro modified nucleotide
  modified_base 24: mod_base = OTHER; note = 2'-fluoro modified nucleotide
  modified_base 25: mod_base = OTHER; note = 2'-O-methyl modified nucleotide
  modified_base 26: mod_base = OTHER; note = 2'-O-methyl modified nucleotide
  modified_base 27: mod_base = OTHER; note = 2'-O-methyl modified nucleotide
  modified_base 28: mod_base = OTHER; note = 2'-O-methyl modified nucleotide
  modified_base 29: mod_base = OTHER; note = 2'-O-methyl modified nucleotide
  modified_base 30: mod_base = OTHER; note = 2'-O-methyl modified nucleotide
  modified_base 31: mod_base = OTHER; note = 2'-O-methyl modified nucleotide
  modified_base 32: mod_base = OTHER; note = 2'-O-methyl modified nucleotide
  modified_base 33: mod_base = OTHER; note = 2'-O-methyl modified nucleotide
  misc_difference 34: note = 2'-O-methyl modified nucleotide may be trivalent N-acetylgalactosamine modified
ncaggttttccatatccttatatggaaaacctga

SEQ ID NO: 1612 - RNA, 34 nt, synthetic construct
  source 1..34: mol_type = other RNA
  misc_difference 1: note = 2'-O-methyl modified nucleotide may be 5' phosphate modified
  modified_base 2: mod_base = OTHER; note = 2'-fluoro modified nucleotide
  modified_base 3: mod_base = OTHER; note = 2'-O-methyl modified nucleotide
  modified_base 4: mod_base = OTHER; note = 2'-O-methyl modified nucleotide
  modified_base 5: mod_base = OTHER; note = 2'-O-methyl modified nucleotide
  modified_base 6: mod_base = OTHER; note = 2'-O-methyl modified nucleotide
  modified_base 7: mod_base = OTHER; note = 2'-O-methyl modified nucleotide
  modified_base 8: mod_base = OTHER; note = 2'-O-methyl modified nucleotide
  modified_base 9: mod_base = OTHER; note = 2'-O-methyl modified nucleotide
  modified_base 10: mod_base = OTHER; note = 2'-O-methyl modified nucleotide
  modified_base 11: mod_base = OTHER; note = 2'-O-methyl modified nucleotide
  modified_base 12: mod_base = OTHER; note = 2'-O-methyl modified nucleotide
  modified_base 13: mod_base = OTHER; note = 2'-O-methyl modified nucleotide
  modified_base 14: mod_base = OTHER; note = 2'-fluoro modified nucleotide
  modified_base 15: mod_base = OTHER; note = 2'-O-methyl modified nucleotide
  modified_base 16: mod_base = OTHER; note = 2'-O-methyl modified nucleotide
  modified_base 17: mod_base = OTHER; note = 2'-O-methyl modified nucleotide
  modified_base 18: mod_base = OTHER; note = 2'-O-methyl modified nucleotide
  modified_base 19: mod_base = OTHER; note = 2'-O-methyl modified nucleotide
  modified_base 20: mod_base = OTHER; note = 2'-O-methyl modified nucleotide
  modified_base 21: mod_base = OTHER; note = 2'-O-methyl modified nucleotide
  modified_base 22: mod_base = OTHER; note = 2'-fluoro modified nucleotide
  modified_base 23: mod_base = OTHER; note = 2'-fluoro modified nucleotide
  modified_base 24: mod_base = OTHER; note = 2'-fluoro modified nucleotide
  modified_base 25: mod_base = OTHER; note = 2'-O-methyl modified nucleotide
  modified_base 26: mod_base = OTHER; note = 2'-O-methyl modified nucleotide
  modified_base 27: mod_base = OTHER; note = 2'-O-methyl modified nucleotide
  modified_base 28: mod_base = OTHER; note = 2'-O-methyl modified nucleotide
  modified_base 29: mod_base = OTHER; note = 2'-O-methyl modified nucleotide
  modified_base 30: mod_base = OTHER; note = 2'-O-methyl modified nucleotide
  modified_base 31: mod_base = OTHER; note = 2'-O-methyl modified nucleotide
  modified_base 32: mod_base = OTHER; note = 2'-O-methyl modified nucleotide
  modified_base 33: mod_base = OTHER; note = 2'-O-methyl modified nucleotide
  misc_difference 34: note = 2'-O-methyl modified nucleotide may be trivalent N-acetylgalactosamine modified
ngcatctctctcacagctgtgtgagagagatgca

SEQ ID NO: 1613 - RNA, 34 nt, synthetic construct
  source 1..34: mol_type = other RNA
  misc_difference 1: note = 2'-O-methyl modified nucleotide may be 5' phosphate modified
  modified_base 2: mod_base = OTHER; note = 2'-fluoro modified nucleotide
  modified_base 3: mod_base = OTHER; note = 2'-O-methyl modified nucleotide
  modified_base 4: mod_base = OTHER; note = 2'-O-methyl modified nucleotide
  modified_base 5: mod_base = OTHER; note = 2'-O-methyl modified nucleotide
  modified_base 6: mod_base = OTHER; note = 2'-O-methyl modified nucleotide
  modified_base 7: mod_base = OTHER; note = 2'-O-methyl modified nucleotide
  modified_base 8: mod_base = OTHER; note = 2'-O-methyl modified nucleotide
  modified_base 9: mod_base = OTHER; note = 2'-O-methyl modified nucleotide
  modified_base 10: mod_base = OTHER; note = 2'-O-methyl modified nucleotide
  modified_base 11: mod_base = OTHER; note = 2'-O-methyl modified nucleotide
  modified_base 12: mod_base = OTHER; note = 2'-O-methyl modified nucleotide
  modified_base 13: mod_base = OTHER; note = 2'-O-methyl modified nucleotide
  modified_base 14: mod_base = OTHER; note = 2'-fluoro modified nucleotide
  modified_base 15: mod_base = OTHER; note = 2'-O-methyl modified nucleotide
  modified_base 16: mod_base = OTHER; note = 2'-O-methyl modified nucleotide
  modified_base 17: mod_base = OTHER; note = 2'-O-methyl modified nucleotide
  modified_base 18: mod_base = OTHER; note = 2'-O-methyl modified nucleotide
  modified_base 19: mod_base = OTHER; note = 2'-O-methyl modified nucleotide
  modified_base 20: mod_base = OTHER; note = 2'-O-methyl modified nucleotide
  modified_base 21: mod_base = OTHER; note = 2'-O-methyl modified nucleotide
  modified_base 22: mod_base = OTHER; note = 2'-fluoro modified nucleotide
  modified_base 23: mod_base = OTHER; note = 2'-fluoro modified nucleotide
  modified_base 24: mod_base = OTHER; note = 2'-fluoro modified nucleotide
  modified_base 25: mod_base = OTHER; note = 2'-O-methyl modified nucleotide
  modified_base 26: mod_base = OTHER; note = 2'-O-methyl modified nucleotide
  modified_base 27: mod_base = OTHER; note = 2'-O-methyl modified nucleotide
  modified_base 28: mod_base = OTHER; note = 2'-O-methyl modified nucleotide
  modified_base 29: mod_base = OTHER; note = 2'-O-methyl modified nucleotide
  modified_base 30: mod_base = OTHER; note = 2'-O-methyl modified nucleotide
  modified_base 31: mod_base = OTHER; note = 2'-O-methyl modified nucleotide
  modified_base 32: mod_base = OTHER; note = 2'-O-methyl modified nucleotide
  modified_base 33: mod_base = OTHER; note = 2'-O-methyl modified nucleotide
  misc_difference 34: note = 2'-O-methyl modified nucleotide may be trivalent N-acetylgalactosamine modified
nacatccagataatcctccgattatctggatgta

SEQ ID NO: 1614 - RNA, 34 nt, synthetic construct
  source 1..34: mol_type = other RNA
  misc_difference 1: note = 2'-O-methyl modified nucleotide may be 5' phosphate modified
  modified_base 2: mod_base = OTHER; note = 2'-fluoro modified nucleotide
  modified_base 3: mod_base = OTHER; note = 2'-O-methyl modified nucleotide
  modified_base 4: mod_base = OTHER; note = 2'-O-methyl modified nucleotide
  modified_base 5: mod_base = OTHER; note = 2'-O-methyl modified nucleotide
  modified_base 6: mod_base = OTHER; note = 2'-O-methyl modified nucleotide
  modified_base 7: mod_base = OTHER; note = 2'-O-methyl modified nucleotide
  modified_base 8: mod_base = OTHER; note = 2'-O-methyl modified nucleotide
  modified_base 9: mod_base = OTHER; note = 2'-O-methyl modified nucleotide
  modified_base 10: mod_base = OTHER; note = 2'-O-methyl modified nucleotide
  modified_base 11: mod_base = OTHER; note = 2'-O-methyl modified nucleotide
  modified_base 12: mod_base = OTHER; note = 2'-O-methyl modified nucleotide
  modified_base 13: mod_base = OTHER; note = 2'-O-methyl modified nucleotide
  modified_base 14: mod_base = OTHER; note = 2'-fluoro modified nucleotide
  modified_base 15: mod_base = OTHER; note = 2'-O-methyl modified nucleotide
  modified_base 16: mod_base = OTHER; note = 2'-O-methyl modified nucleotide
  modified_base 17: mod_base = OTHER; note = 2'-O-methyl modified nucleotide
  modified_base 18: mod_base = OTHER; note = 2'-O-methyl modified nucleotide
  modified_base 19: mod_base = OTHER; note = 2'-O-methyl modified nucleotide
  modified_base 20: mod_base = OTHER; note = 2'-O-methyl modified nucleotide
  modified_base 21: mod_base = OTHER; note = 2'-O-methyl modified nucleotide
  modified_base 22: mod_base = OTHER; note = 2'-fluoro modified nucleotide
  modified_base 23: mod_base = OTHER; note = 2'-fluoro modified nucleotide
  modified_base 24: mod_base = OTHER; note = 2'-fluoro modified nucleotide
  modified_base 25: mod_base = OTHER; note = 2'-O-methyl modified nucleotide
  modified_base 26: mod_base = OTHER; note = 2'-O-methyl modified nucleotide
  modified_base 27: mod_base = OTHER; note = 2'-O-methyl modified nucleotide
  modified_base 28: mod_base = OTHER; note = 2'-O-methyl modified nucleotide
  modified_base 29: mod_base = OTHER; note = 2'-O-methyl modified nucleotide
  modified_base 30: mod_base = OTHER; note = 2'-O-methyl modified nucleotide
  modified_base 31: mod_base = OTHER; note = 2'-O-methyl modified nucleotide
  modified_base 32: mod_base = OTHER; note = 2'-O-methyl modified nucleotide
  modified_base 33: mod_base = OTHER; note = 2'-O-methyl modified nucleotide
  misc_difference 34: note = 2'-O-methyl modified nucleotide may be trivalent N-acetylgalactosamine modified
ncgagttgttccctcggtggagggaacaactcga

SEQ ID NO: 1615 - RNA, 34 nt, synthetic construct
  source 1..34: mol_type = other RNA
  misc_difference 1: note = 2'-O-methyl modified nucleotide may be 5' phosphate modified
  modified_base 2: mod_base = OTHER; note = 2'-fluoro modified nucleotide
  modified_base 3: mod_base = OTHER; note = 2'-O-methyl modified nucleotide
  modified_base 4: mod_base = OTHER; note = 2'-O-methyl modified nucleotide
  modified_base 5: mod_base = OTHER; note = 2'-O-methyl modified nucleotide
  modified_base 6: mod_base = OTHER; note = 2'-O-methyl modified nucleotide
  modified_base 7: mod_base = OTHER; note = 2'-O-methyl modified nucleotide
  modified_base 8: mod_base = OTHER; note = 2'-O-methyl modified nucleotide
  modified_base 9: mod_base = OTHER; note = 2'-O-methyl modified nucleotide
  modified_base 10: mod_base = OTHER; note = 2'-O-methyl modified nucleotide
  modified_base 11: mod_base = OTHER; note = 2'-O-methyl modified nucleotide
  modified_base 12: mod_base = OTHER; note = 2'-O-methyl modified nucleotide
  modified_base 13: mod_base = OTHER; note = 2'-O-methyl modified nucleotide
  modified_base 14: mod_base = OTHER; note = 2'-fluoro modified nucleotide
  modified_base 15: mod_base = OTHER; note = 2'-O-methyl modified nucleotide
  modified_base 16: mod_base = OTHER; note = 2'-O-methyl modified nucleotide
  modified_base 17: mod_base = OTHER; note = 2'-O-methyl modified nucleotide
  modified_base 18: mod_base = OTHER; note = 2'-O-methyl modified nucleotide
  modified_base 19: mod_base = OTHER; note = 2'-O-methyl modified nucleotide
  modified_base 20: mod_base = OTHER; note = 2'-O-methyl modified nucleotide
  modified_base 21: mod_base = OTHER; note = 2'-O-methyl modified nucleotide
  modified_base 22: mod_base = OTHER; note = 2'-fluoro modified nucleotide
  modified_base 23: mod_base = OTHER; note = 2'-fluoro modified nucleotide
  modified_base 24: mod_base = OTHER; note = 2'-fluoro modified nucleotide
  modified_base 25: mod_base = OTHER; note = 2'-O-methyl modified nucleotide
  modified_base 26: mod_base = OTHER; note = 2'-O-methyl modified nucleotide
  modified_base 27: mod_base = OTHER; note = 2'-O-methyl modified nucleotide
  modified_base 28: mod_base = OTHER; note = 2'-O-methyl modified nucleotide
  modified_base 29: mod_base = OTHER; note = 2'-O-methyl modified nucleotide
  modified_base 30: mod_base = OTHER; note = 2'-O-methyl modified nucleotide
  modified_base 31: mod_base = OTHER; note = 2'-O-methyl modified nucleotide
  modified_base 32: mod_base = OTHER; note = 2'-O-methyl modified nucleotide
  modified_base 33: mod_base = OTHER; note = 2'-O-methyl modified nucleotide
  misc_difference 34: note = 2'-O-methyl modified nucleotide may be trivalent N-acetylgalactosamine modified
nacacatgttgctcattgttgagcaacatgtgta

SEQ ID NO: 1616 - RNA, 34 nt, synthetic construct
  source 1..34: mol_type = other RNA
  misc_difference 1: note = 2'-O-methyl modified nucleotide may be 5' phosphate modified
  modified_base 2: mod_base = OTHER; note = 2'-fluoro modified nucleotide
  modified_base 3: mod_base = OTHER; note = 2'-O-methyl modified nucleotide
  modified_base 4: mod_base = OTHER; note = 2'-O-methyl modified nucleotide
  modified_base 5: mod_base = OTHER; note = 2'-O-methyl modified nucleotide
  modified_base 6: mod_base = OTHER; note = 2'-O-methyl modified nucleotide
  modified_base 7: mod_base = OTHER; note = 2'-O-methyl modified nucleotide
  modified_base 8: mod_base = OTHER; note = 2'-O-methyl modified nucleotide
  modified_base 9: mod_base = OTHER; note = 2'-O-methyl modified nucleotide
  modified_base 10: mod_base = OTHER; note = 2'-O-methyl modified nucleotide
  modified_base 11: mod_base = OTHER; note = 2'-O-methyl modified nucleotide
  modified_base 12: mod_base = OTHER; note = 2'-O-methyl modified nucleotide
  modified_base 13: mod_base = OTHER; note = 2'-O-methyl modified nucleotide
  modified_base 14: mod_base = OTHER; note = 2'-fluoro modified nucleotide
  modified_base 15: mod_base = OTHER; note = 2'-O-methyl modified nucleotide
  modified_base 16: mod_base = OTHER; note = 2'-O-methyl modified nucleotide
  modified_base 17: mod_base = OTHER; note = 2'-O-methyl modified nucleotide
  modified_base 18: mod_base = OTHER; note = 2'-O-methyl modified nucleotide
  modified_base 19: mod_base = OTHER; note = 2'-O-methyl modified nucleotide
  modified_base 20: mod_base = OTHER; note = 2'-O-methyl modified nucleotide
  modified_base 21: mod_base = OTHER; note = 2'-O-methyl modified nucleotide
  modified_base 22: mod_base = OTHER; note = 2'-fluoro modified nucleotide
  modified_base 23: mod_base = OTHER; note = 2'-fluoro modified nucleotide
  modified_base 24: mod_base = OTHER; note = 2'-fluoro modified nucleotide
  modified_base 25: mod_base = OTHER; note = 2'-O-methyl modified nucleotide
  modified_base 26: mod_base = OTHER; note = 2'-O-methyl modified nucleotide
  modified_base 27: mod_base = OTHER; note = 2'-O-methyl modified nucleotide
  modified_base 28: mod_base = OTHER; note = 2'-O-methyl modified nucleotide
  modified_base 29: mod_base = OTHER; note = 2'-O-methyl modified nucleotide
  modified_base 30: mod_base = OTHER; note = 2'-O-methyl modified nucleotide
  modified_base 31: mod_base = OTHER; note = 2'-O-methyl modified nucleotide
  modified_base 32: mod_base = OTHER; note = 2'-O-methyl modified nucleotide
  modified_base 33: mod_base = OTHER; note = 2'-O-methyl modified nucleotide
  misc_difference 34: note = 2'-O-methyl modified nucleotide may be trivalent N-acetylgalactosamine modified
ntctcaattaagttgactacaacttaattgagaa

SEQ ID NO: 1617 - RNA, 34 nt, synthetic construct
  source 1..34: mol_type = other RNA
  misc_difference 1: note = 2'-O-methyl modified nucleotide may be 5' phosphate modified
  modified_base 2: mod_base = OTHER; note = 2'-fluoro modified nucleotide
  modified_base 3: mod_base = OTHER; note = 2'-O-methyl modified nucleotide
  modified_base 4: mod_base = OTHER; note = 2'-O-methyl modified nucleotide
  modified_base 5: mod_base = OTHER; note = 2'-O-methyl modified nucleotide
  modified_base 6: mod_base = OTHER; note = 2'-O-methyl modified nucleotide
  modified_base 7: mod_base = OTHER; note = 2'-O-methyl modified nucleotide
  modified_base 8: mod_base = OTHER; note = 2'-O-methyl modified nucleotide
  modified_base 9: mod_base = OTHER; note = 2'-O-methyl modified nucleotide
  modified_base 10: mod_base = OTHER; note = 2'-O-methyl modified nucleotide
  modified_base 11: mod_base = OTHER; note = 2'-O-methyl modified nucleotide
  modified_base 12: mod_base = OTHER; note = 2'-O-methyl modified nucleotide
  modified_base 13: mod_base = OTHER; note = 2'-O-methyl modified nucleotide
  modified_base 14: mod_base = OTHER; note = 2'-fluoro modified nucleotide
  modified_base 15: mod_base = OTHER; note = 2'-O-methyl modified nucleotide
  modified_base 16: mod_base = OTHER; note = 2'-O-methyl modified nucleotide
  modified_base 17: mod_base = OTHER; note = 2'-O-methyl modified nucleotide
  modified_base 18: mod_base = OTHER; note = 2'-O-methyl modified nucleotide
  modified_base 19: mod_base = OTHER; note = 2'-O-methyl modified nucleotide
  modified_base 20: mod_base = OTHER; note = 2'-O-methyl modified nucleotide
  modified_base 21: mod_base = OTHER; note = 2'-O-methyl modified nucleotide
  modified_base 22: mod_base = OTHER; note = 2'-fluoro modified nucleotide
  modified_base 23: mod_base = OTHER; note = 2'-fluoro modified nucleotide
  modified_base 24: mod_base = OTHER; note = 2'-fluoro modified nucleotide
  modified_base 25: mod_base = OTHER; note = 2'-O-methyl modified nucleotide
  modified_base 26: mod_base = OTHER; note = 2'-O-methyl modified nucleotide
  modified_base 27: mod_base = OTHER; note = 2'-O-methyl modified nucleotide
  modified_base 28: mod_base = OTHER; note = 2'-O-methyl modified nucleotide
  modified_base 29: mod_base = OTHER; note = 2'-O-methyl modified nucleotide
  modified_base 30: mod_base = OTHER; note = 2'-O-methyl modified nucleotide
  modified_base 31: mod_base = OTHER; note = 2'-O-methyl modified nucleotide
  modified_base 32: mod_base = OTHER; note = 2'-O-methyl modified nucleotide
  modified_base 33: mod_base = OTHER; note = 2'-O-methyl modified nucleotide
  misc_difference 34: note = 2'-O-methyl modified nucleotide may be trivalent N-acetylgalactosamine modified
ngaagccaaagcattgatgaatgctttggcttca

SEQ ID NO: 1618 - RNA, 34 nt, synthetic construct
  source 1..34: mol_type = other RNA
  misc_difference 1: note = 2'-O-methyl modified nucleotide may be 5' phosphate modified
  modified_base 2: mod_base = OTHER; note = 2'-fluoro modified nucleotide
  modified_base 3: mod_base = OTHER; note = 2'-O-methyl modified nucleotide
  modified_base 4: mod_base = OTHER; note = 2'-O-methyl modified nucleotide
  modified_base 5: mod_base = OTHER; note = 2'-O-methyl modified nucleotide
  modified_base 6: mod_base = OTHER; note = 2'-O-methyl modified nucleotide
  modified_base 7: mod_base = OTHER; note = 2'-O-methyl modified nucleotide
  modified_base 8: mod_base = OTHER; note = 2'-O-methyl modified nucleotide
  modified_base 9: mod_base = OTHER; note = 2'-O-methyl modified nucleotide
  modified_base 10: mod_base = OTHER; note = 2'-O-methyl modified nucleotide
  modified_base 11: mod_base = OTHER; note = 2'-O-methyl modified nucleotide
  modified_base 12: mod_base = OTHER; note = 2'-O-methyl modified nucleotide
  modified_base 13: mod_base = OTHER; note = 2'-O-methyl modified nucleotide
  modified_base 14: mod_base = OTHER; note = 2'-fluoro modified nucleotide
  modified_base 15: mod_base = OTHER; note = 2'-O-methyl modified nucleotide
  modified_base 16: mod_base = OTHER; note = 2'-O-methyl modified nucleotide
  modified_base 17: mod_base = OTHER; note = 2'-O-methyl modified nucleotide
  modified_base 18: mod_base = OTHER; note = 2'-O-methyl modified nucleotide
  modified_base 19: mod_base = OTHER; note = 2'-O-methyl modified nucleotide
  modified_base 20: mod_base = OTHER; note = 2'-O-methyl modified nucleotide
  modified_base 21: mod_base = OTHER; note = 2'-O-methyl modified nucleotide
  modified_base 22: mod_base = OTHER; note = 2'-fluoro modified nucleotide
  modified_base 23: mod_base = OTHER; note = 2'-fluoro modified nucleotide
  modified_base 24: mod_base = OTHER; note = 2'-fluoro modified nucleotide
  modified_base 25: mod_base = OTHER; note = 2'-O-methyl modified nucleotide
  modified_base 26: mod_base = OTHER; note = 2'-O-methyl modified nucleotide
  modified_base 27: mod_base = OTHER; note = 2'-O-methyl modified nucleotide
  modified_base 28: mod_base = OTHER; note = 2'-O-methyl modified nucleotide
  modified_base 29: mod_base = OTHER; note = 2'-O-methyl modified nucleotide
  modified_base 30: mod_base = OTHER; note = 2'-O-methyl modified nucleotide
  modified_base 31: mod_base = OTHER; note = 2'-O-methyl modified nucleotide
  modified_base 32: mod_base = OTHER; note = 2'-O-methyl modified nucleotide
  modified_base 33: mod_base = OTHER; note = 2'-O-methyl modified nucleotide
  misc_difference 34: note = 2'-O-methyl modified nucleotide may be trivalent N-acetylgalactosamine modified
ngcagtggaaagagatctctctctttccactgca

SEQ ID NO: 1619 - RNA, 34 nt, synthetic construct
  source 1..34: mol_type = other RNA
  misc_difference 1: note = 2'-O-methyl modified nucleotide may be 5' phosphate modified
  modified_base 2: mod_base = OTHER; note = 2'-fluoro modified nucleotide
  modified_base 3: mod_base = OTHER; note = 2'-O-methyl modified nucleotide
  modified_base 4: mod_base = OTHER; note = 2'-O-methyl modified nucleotide
  modified_base 5: mod_base = OTHER; note = 2'-O-methyl modified nucleotide
  modified_base 6: mod_base = OTHER; note = 2'-O-methyl modified nucleotide
  modified_base 7: mod_base = OTHER; note = 2'-O-methyl modified nucleotide
  modified_base 8: mod_base = OTHER; note = 2'-O-methyl modified nucleotide
  modified_base 9: mod_base = OTHER; note = 2'-O-methyl modified nucleotide
  modified_base 10: mod_base = OTHER; note = 2'-O-methyl modified nucleotide
  modified_base 11: mod_base = OTHER; note = 2'-O-methyl modified nucleotide
  modified_base 12: mod_base = OTHER; note = 2'-O-methyl modified nucleotide
  modified_base 13: mod_base = OTHER; note = 2'-O-methyl modified nucleotide
  modified_base 14: mod_base = OTHER; note = 2'-fluoro modified nucleotide
  modified_base 15: mod_base = OTHER; note = 2'-O-methyl modified nucleotide
  modified_base 16: mod_base = OTHER; note = 2'-O-methyl modified nucleotide
  modified_base 17: mod_base = OTHER; note = 2'-O-methyl modified nucleotide
  modified_base 18: mod_base = OTHER; note = 2'-O-methyl modified nucleotide
  modified_base 19: mod_base = OTHER; note = 2'-O-methyl modified nucleotide
  modified_base 20: mod_base = OTHER; note = 2'-O-methyl modified nucleotide
  modified_base 21: mod_base = OTHER; note = 2'-O-methyl modified nucleotide
  modified_base 22: mod_base = OTHER; note = 2'-fluoro modified nucleotide
  modified_base 23: mod_base = OTHER; note = 2'-fluoro modified nucleotide
  modified_base 24: mod_base = OTHER; note = 2'-fluoro modified nucleotide
  modified_base 25: mod_base = OTHER; note = 2'-O-methyl modified nucleotide
  modified_base 26: mod_base = OTHER; note = 2'-O-methyl modified nucleotide
  modified_base 27: mod_base = OTHER; note = 2'-O-methyl modified nucleotide
  modified_base 28: mod_base = OTHER; note = 2'-O-methyl modified nucleotide
  modified_base 29: mod_base = OTHER; note = 2'-O-methyl modified nucleotide
  modified_base 30: mod_base = OTHER; note = 2'-O-methyl modified nucleotide
  modified_base 31: mod_base = OTHER; note = 2'-O-methyl modified nucleotide
  modified_base 32: mod_base = OTHER; note = 2'-O-methyl modified nucleotide
  modified_base 33: mod_base = OTHER; note = 2'-O-methyl modified nucleotide
  misc_difference 34: note = 2'-O-methyl modified nucleotide may be trivalent N-acetylgalactosamine modified
nacactgcctggagggcctcctccaggcagtgta

SEQ ID NO: 1620 - RNA, 34 nt, synthetic construct
  source 1..34: mol_type = other RNA
  misc_difference 1: note = 2'-O-methyl modified nucleotide may be 5' phosphate modified
  modified_base 2: mod_base = OTHER; note = 2'-fluoro modified nucleotide
  modified_base 3: mod_base = OTHER; note = 2'-O-methyl modified nucleotide
  modified_base 4: mod_base = OTHER; note = 2'-O-methyl modified nucleotide
  modified_base 5: mod_base = OTHER; note = 2'-O-methyl modified nucleotide
  modified_base 6: mod_base = OTHER; note = 2'-O-methyl modified nucleotide
  modified_base 7: mod_base = OTHER; note = 2'-O-methyl modified nucleotide
  modified_base 8: mod_base = OTHER; note = 2'-O-methyl modified nucleotide
  modified_base 9: mod_base = OTHER; note = 2'-O-methyl modified nucleotide
  modified_base 10: mod_base = OTHER; note = 2'-O-methyl modified nucleotide
  modified_base 11: mod_base = OTHER; note = 2'-O-methyl modified nucleotide
  modified_base 12: mod_base = OTHER; note = 2'-O-methyl modified nucleotide
  modified_base 13: mod_base = OTHER; note = 2'-O-methyl modified nucleotide
  modified_base 14: mod_base = OTHER; note = 2'-fluoro modified nucleotide
  modified_base 15: mod_base = OTHER; note = 2'-O-methyl modified nucleotide
  modified_base 16: mod_base = OTHER; note = 2'-O-methyl modified nucleotide
  modified_base 17: mod_base = OTHER; note = 2'-O-methyl modified nucleotide
  modified_base 18: mod_base = OTHER; note = 2'-O-methyl modified nucleotide
  modified_base 19: mod_base = OTHER; note = 2'-O-methyl modified nucleotide
  modified_base 20: mod_base = OTHER; note = 2'-O-methyl modified nucleotide
  modified_base 21: mod_base = OTHER; note = 2'-O-methyl modified nucleotide
  modified_base 22: mod_base = OTHER; note = 2'-fluoro modified nucleotide
  modified_base 23: mod_base = OTHER; note = 2'-fluoro modified nucleotide
  modified_base 24: mod_base = OTHER; note = 2'-fluoro modified nucleotide
  modified_base 25: mod_base = OTHER; note = 2'-O-methyl modified nucleotide
  modified_base 26: mod_base = OTHER; note = 2'-O-methyl modified nucleotide
  modified_base 27: mod_base = OTHER; note = 2'-O-methyl modified nucleotide
  modified_base 28: mod_base = OTHER; note = 2'-O-methyl modified nucleotide
  modified_base 29: mod_base = OTHER; note = 2'-O-methyl modified nucleotide
  modified_base 30: mod_base = OTHER; note = 2'-O-methyl modified nucleotide
  modified_base 31: mod_base = OTHER; note = 2'-O-methyl modified nucleotide
  modified_base 32: mod_base = OTHER; note = 2'-O-methyl modified nucleotide
  modified_base 33: mod_base = OTHER; note = 2'-O-methyl modified nucleotide
  misc_difference 34: note = 2'-O-methyl modified nucleotide may be trivalent N-acetylgalactosamine modified
ntagacctggtcacattcctgtgaccaggtctaa

SEQ ID NO: 1621 - RNA, 34 nt, synthetic construct
  source 1..34: mol_type = other RNA
  misc_difference 1: note = 2'-O-methyl modified nucleotide may be 5' phosphate modified
  modified_base 2: mod_base = OTHER; note = 2'-fluoro modified nucleotide
  modified_base 3: mod_base = OTHER; note = 2'-O-methyl modified nucleotide
  modified_base 4: mod_base = OTHER; note = 2'-O-methyl modified nucleotide
  modified_base 5: mod_base = OTHER; note = 2'-O-methyl modified nucleotide
  modified_base 6: mod_base = OTHER; note = 2'-O-methyl modified nucleotide
  modified_base 7: mod_base = OTHER; note = 2'-O-methyl modified nucleotide
  modified_base 8: mod_base = OTHER; note = 2'-O-methyl modified nucleotide
  modified_base 9: mod_base = OTHER; note = 2'-O-methyl modified nucleotide
  modified_base 10: mod_base = OTHER; note = 2'-O-methyl modified nucleotide
  modified_base 11: mod_base = OTHER; note = 2'-O-methyl modified nucleotide
  modified_base 12: mod_base = OTHER; note = 2'-O-methyl modified nucleotide
  modified_base 13: mod_base = OTHER; note = 2'-O-methyl modified nucleotide
  modified_base 14: mod_base = OTHER; note = 2'-fluoro modified nucleotide
  modified_base 15: mod_base = OTHER; note = 2'-O-methyl modified nucleotide
  modified_base 16: mod_base = OTHER; note = 2'-O-methyl modified nucleotide
  modified_base 17: mod_base = OTHER; note = 2'-O-methyl modified nucleotide
  modified_base 18: mod_base = OTHER; note = 2'-O-methyl modified nucleotide
  modified_base 19: mod_base = OTHER; note = 2'-O-methyl modified nucleotide
  modified_base 20: mod_base = OTHER; note = 2'-O-methyl modified nucleotide
  modified_base 21: mod_base = OTHER; note = 2'-O-methyl modified nucleotide
  modified_base 22: mod_base = OTHER; note = 2'-fluoro modified nucleotide
  modified_base 23: mod_base = OTHER; note = 2'-fluoro modified nucleotide
  modified_base 24: mod_base = OTHER; note = 2'-fluoro modified nucleotide
  modified_base 25: mod_base = OTHER; note = 2'-O-methyl modified nucleotide
  modified_base 26: mod_base = OTHER; note = 2'-O-methyl modified nucleotide
  modified_base 27: mod_base = OTHER; note = 2'-O-methyl modified nucleotide
  modified_base 28: mod_base = OTHER; note = 2'-O-methyl modified nucleotide
  modified_base 29: mod_base = OTHER; note = 2'-O-methyl modified nucleotide
  modified_base 30: mod_base = OTHER; note = 2'-O-methyl modified nucleotide
  modified_base 31: mod_base = OTHER; note = 2'-O-methyl modified nucleotide
  modified_base 32: mod_base = OTHER; note = 2'-O-methyl modified nucleotide
  modified_base 33: mod_base = OTHER; note = 2'-O-methyl modified nucleotide
  misc_difference 34: note = 2'-O-methyl modified nucleotide may be trivalent N-acetylgalactosamine modified
ncagacacaaacagagctttctgtttgtgtctga

SEQ ID NO: 1622 - RNA, 34 nt, synthetic construct
  source 1..34: mol_type = other RNA
  misc_difference 1: note = 2'-O-methyl modified nucleotide may be 5' phosphate modified
  modified_base 2: mod_base = OTHER; note = 2'-fluoro modified nucleotide
  modified_base 3: mod_base = OTHER; note = 2'-O-methyl modified nucleotide
  modified_base 4: mod_base = OTHER; note = 2'-O-methyl modified nucleotide
  modified_base 5: mod_base = OTHER; note = 2'-O-methyl modified nucleotide
  modified_base 6: mod_base = OTHER; note = 2'-O-methyl modified nucleotide
  modified_base 7: mod_base = OTHER; note = 2'-O-methyl modified nucleotide
  modified_base 8: mod_base = OTHER; note = 2'-O-methyl modified nucleotide
  modified_base 9: mod_base = OTHER; note = 2'-O-methyl modified nucleotide
  modified_base 10: mod_base = OTHER; note = 2'-O-methyl modified nucleotide
  modified_base 11: mod_base = OTHER; note = 2'-O-methyl modified nucleotide
  modified_base 12: mod_base = OTHER; note = 2'-O-methyl modified nucleotide
  modified_base 13: mod_base = OTHER; note = 2'-O-methyl modified nucleotide
  modified_base 14: mod_base = OTHER; note = 2'-fluoro modified nucleotide
  modified_base 15: mod_base = OTHER; note = 2'-O-methyl modified nucleotide
  modified_base 16: mod_base = OTHER; note = 2'-O-methyl modified nucleotide
  modified_base 17: mod_base = OTHER; note = 2'-O-methyl modified nucleotide
  modified_base 18: mod_base = OTHER; note = 2'-O-methyl modified nucleotide
  modified_base 19: mod_base = OTHER; note = 2'-O-methyl modified nucleotide
  modified_base 20: mod_base = OTHER; note = 2'-O-methyl modified nucleotide
  modified_base 21: mod_base = OTHER; note = 2'-O-methyl modified nucleotide
  modified_base 22: mod_base = OTHER; note = 2'-fluoro modified nucleotide
  modified_base 23: mod_base = OTHER; note = 2'-fluoro modified nucleotide
  modified_base 24: mod_base = OTHER; note = 2'-fluoro modified nucleotide
  modified_base 25: mod_base = OTHER; note = 2'-O-methyl modified nucleotide
  modified_base 26: mod_base = OTHER; note = 2'-O-methyl modified nucleotide
  modified_base 27: mod_base = OTHER; note = 2'-O-methyl modified nucleotide
  modified_base 28: mod_base = OTHER; note = 2'-O-methyl modified nucleotide
  modified_base 29: mod_base = OTHER; note = 2'-O-methyl modified nucleotide
  modified_base 30: mod_base = OTHER; note = 2'-O-methyl modified nucleotide
  modified_base 31: mod_base = OTHER; note = 2'-O-methyl modified nucleotide
  modified_base 32: mod_base = OTHER; note = 2'-O-methyl modified nucleotide
  modified_base 33: mod_base = OTHER; note = 2'-O-methyl modified nucleotide
  misc_difference 34: note = 2'-O-methyl modified nucleotide may be trivalent N-acetylgalactosamine modified
ngagtttctccttcagccatgaaggagaaactca

SEQ ID NO: 1623 - RNA, 34 nt, synthetic construct
  source 1..34: mol_type = other RNA
  misc_difference 1: note = 2'-O-methyl modified nucleotide may be 5' phosphate modified
  modified_base 2: mod_base = OTHER; note = 2'-fluoro modified nucleotide
  modified_base 3: mod_base = OTHER; note = 2'-O-methyl modified nucleotide
  modified_base 4: mod_base = OTHER; note = 2'-O-methyl modified nucleotide
  modified_base 5: mod_base = OTHER; note = 2'-O-methyl modified nucleotide
  modified_base 6: mod_base = OTHER; note = 2'-O-methyl modified nucleotide
  modified_base 7: mod_base = OTHER; note = 2'-O-methyl modified nucleotide
  modified_base 8: mod_base = OTHER; note = 2'-O-methyl modified nucleotide
  modified_base 9: mod_base = OTHER; note = 2'-O-methyl modified nucleotide
  modified_base 10: mod_base = OTHER; note = 2'-O-methyl modified nucleotide
  modified_base 11: mod_base = OTHER; note = 2'-O-methyl modified nucleotide
  modified_base 12: mod_base = OTHER; note = 2'-O-methyl modified nucleotide
  modified_base 13: mod_base = OTHER; note = 2'-O-methyl modified nucleotide
  modified_base 14: mod_base = OTHER; note = 2'-fluoro modified nucleotide
  modified_base 15: mod_base = OTHER; note = 2'-O-methyl modified nucleotide
  modified_base 16: mod_base = OTHER; note = 2'-O-methyl modified nucleotide
  modified_base 17: mod_base = OTHER; note = 2'-O-methyl modified nucleotide
  modified_base 18: mod_base = OTHER; note = 2'-O-methyl modified nucleotide
  modified_base 19: mod_base = OTHER; note = 2'-O-methyl modified nucleotide
  modified_base 20: mod_base = OTHER; note = 2'-O-methyl modified nucleotide
  modified_base 21: mod_base = OTHER; note = 2'-O-methyl modified nucleotide
  modified_base 22: mod_base = OTHER; note = 2'-fluoro modified nucleotide
  modified_base 23: mod_base = OTHER; note = 2'-fluoro modified nucleotide
  modified_base 24: mod_base = OTHER; note = 2'-fluoro modified nucleotide
  modified_base 25: mod_base = OTHER; note = 2'-O-methyl modified nucleotide
  modified_base 26: mod_base = OTHER; note = 2'-O-methyl modified nucleotide
  modified_base 27: mod_base = OTHER; note = 2'-O-methyl modified nucleotide
  modified_base 28: mod_base = OTHER; note = 2'-O-methyl modified nucleotide
  modified_base 29: mod_base = OTHER; note = 2'-O-methyl modified nucleotide
  modified_base 30: mod_base = OTHER; note = 2'-O-methyl modified nucleotide
  modified_base 31: mod_base = OTHER; note = 2'-O-methyl modified nucleotide
  modified_base 32: mod_base = OTHER; note = 2'-O-methyl modified nucleotide
  modified_base 33: mod_base = OTHER; note = 2'-O-methyl modified nucleotide
  misc_difference 34: note = 2'-O-methyl modified nucleotide may be trivalent N-acetylgalactosamine modified
natgtgctgctgtcagcactgacagcagcacata

SEQ ID NO: 1624 - RNA, 34 nt, synthetic construct
  source 1..34: mol_type = other RNA
  misc_difference 1: note = 2'-O-methyl modified nucleotide may be 5' phosphate modified
  modified_base 2: mod_base = OTHER; note = 2'-fluoro modified nucleotide
  modified_base 3: mod_base = OTHER; note = 2'-O-methyl modified nucleotide
  modified_base 4: mod_base = OTHER; note = 2'-O-methyl modified nucleotide
  modified_base 5: mod_base = OTHER; note = 2'-O-methyl modified nucleotide
  modified_base 6: mod_base = OTHER; note = 2'-O-methyl modified nucleotide
  modified_base 7: mod_base = OTHER; note = 2'-O-methyl modified nucleotide
  modified_base 8: mod_base = OTHER; note = 2'-O-methyl modified nucleotide
  modified_base 9: mod_base = OTHER; note = 2'-O-methyl modified nucleotide
  modified_base 10: mod_base = OTHER; note = 2'-O-methyl modified nucleotide
  modified_base 11: mod_base = OTHER; note = 2'-O-methyl modified nucleotide
  modified_base 12: mod_base = OTHER; note = 2'-O-methyl modified nucleotide
  modified_base 13: mod_base = OTHER; note = 2'-O-methyl modified nucleotide
  modified_base 14: mod_base = OTHER; note = 2'-fluoro modified nucleotide
  modified_base 15: mod_base = OTHER; note = 2'-O-methyl modified nucleotide
  modified_base 16: mod_base = OTHER; note = 2'-O-methyl modified nucleotide
  modified_base 17: mod_base = OTHER; note = 2'-O-methyl modified nucleotide
  modified_base 18: mod_base = OTHER; note = 2'-O-methyl modified nucleotide
  modified_base 19: mod_base = OTHER; note = 2'-O-methyl modified nucleotide
  modified_base 20: mod_base = OTHER; note = 2'-O-methyl modified nucleotide
  modified_base 21: mod_base = OTHER; note = 2'-O-methyl modified nucleotide
  modified_base 22: mod_base = OTHER; note = 2'-fluoro modified nucleotide
  modified_base 23: mod_base = OTHER; note = 2'-fluoro modified nucleotide
  modified_base 24: mod_base = OTHER; note = 2'-fluoro modified nucleotide
  modified_base 25: mod_base = OTHER; note = 2'-O-methyl modified nucleotide
  modified_base 26: mod_base = OTHER; note = 2'-O-methyl modified nucleotide
  modified_base 27: mod_base = OTHER; note = 2'-O-methyl modified nucleotide
  modified_base 28: mod_base = OTHER; note = 2'-O-methyl modified nucleotide
  modified_base 29: mod_base = OTHER; note = 2'-O-methyl modified nucleotide
  modified_base 30: mod_base = OTHER; note = 2'-O-methyl modified nucleotide
  modified_base 31: mod_base = OTHER; note = 2'-O-methyl modified nucleotide
  modified_base 32: mod_base = OTHER; note = 2'-O-methyl modified nucleotide
  modified_base 33: mod_base = OTHER; note = 2'-O-methyl modified nucleotide
  misc_difference 34: note = 2'-O-methyl modified nucleotide may be trivalent N-acetylgalactosamine modified
ncagagctttgatatcctgatatcaaagctctga

SEQ ID NO: 1625 - RNA, 34 nt, synthetic construct
  source 1..34: mol_type = other RNA
  misc_difference 1: note = 2'-O-methyl modified nucleotide may be 5' phosphate modified
  modified_base 2: mod_base = OTHER; note = 2'-fluoro modified nucleotide
  modified_base 3: mod_base = OTHER; note = 2'-O-methyl modified nucleotide
  modified_base 4: mod_base = OTHER; note = 2'-O-methyl modified nucleotide
  modified_base 5: mod_base = OTHER; note = 2'-O-methyl modified nucleotide
  modified_base 6: mod_base = OTHER; note = 2'-O-methyl modified nucleotide
  modified_base 7: mod_base = OTHER; note = 2'-O-methyl modified nucleotide
  modified_base 8: mod_base = OTHER; note = 2'-O-methyl modified nucleotide
  modified_base 9: mod_base = OTHER; note = 2'-O-methyl modified nucleotide
  modified_base 10: mod_base = OTHER; note = 2'-O-methyl modified nucleotide
  modified_base 11: mod_base = OTHER; note = 2'-O-methyl modified nucleotide
  modified_base 12: mod_base = OTHER; note = 2'-O-methyl modified nucleotide
  modified_base 13: mod_base = OTHER; note = 2'-O-methyl modified nucleotide
  modified_base 14: mod_base = OTHER; note = 2'-fluoro modified nucleotide
  modified_base 15: mod_base = OTHER; note = 2'-O-methyl modified nucleotide
  modified_base 16: mod_base = OTHER; note = 2'-O-methyl modified nucleotide
  modified_base 17: mod_base = OTHER; note = 2'-O-methyl modified nucleotide
  modified_base 18: mod_base = OTHER; note = 2'-O-methyl modified nucleotide
  modified_base 19: mod_base = OTHER; note = 2'-O-methyl modified nucleotide
  modified_base 20: mod_base = OTHER; note = 2'-O-methyl modified nucleotide
  modified_base 21: mod_base = OTHER; note = 2'-O-methyl modified nucleotide
  modified_base 22: mod_base = OTHER; note = 2'-fluoro modified nucleotide
  modified_base 23: mod_base = OTHER; note = 2'-fluoro modified nucleotide
  modified_base 24: mod_base = OTHER; note = 2'-fluoro modified nucleotide
  modified_base 25: mod_base = OTHER; note = 2'-O-methyl modified nucleotide
  modified_base 26: mod_base = OTHER; note = 2'-O-methyl modified nucleotide
  modified_base 27: mod_base = OTHER; note = 2'-O-methyl modified nucleotide
  modified_base 28: mod_base = OTHER; note = 2'-O-methyl modified nucleotide
  modified_base 29: mod_base = OTHER; note = 2'-O-methyl modified nucleotide
  modified_base 30: mod_base = OTHER; note = 2'-O-methyl modified nucleotide
  modified_base 31: mod_base = OTHER; note = 2'-O-methyl modified nucleotide
  modified_base 32: mod_base = OTHER; note = 2'-O-methyl modified nucleotide
  modified_base 33: mod_base = OTHER; note = 2'-O-methyl modified nucleotide
  misc_difference 34: note = 2'-O-methyl modified nucleotide may be trivalent N-acetylgalactosamine modified
ngatatcctgtgcagggagctgcacaggatatca

SEQ ID NO: 1626 - RNA, 34 nt, synthetic construct
  source 1..34: mol_type = other RNA
  misc_difference 1: note = 2'-O-methyl modified nucleotide may be 5' phosphate modified
  modified_base 2: mod_base = OTHER; note = 2'-fluoro modified nucleotide
  modified_base 3: mod_base = OTHER; note = 2'-O-methyl modified nucleotide
  modified_base 4: mod_base = OTHER; note = 2'-O-methyl modified nucleotide
  modified_base 5: mod_base = OTHER; note = 2'-O-methyl modified nucleotide
  modified_base 6: mod_base = OTHER; note = 2'-O-methyl modified nucleotide
  modified_base 7: mod_base = OTHER; note = 2'-O-methyl modified nucleotide
  modified_base 8: mod_base = OTHER; note = 2'-O-methyl modified nucleotide
  modified_base 9: mod_base = OTHER; note = 2'-O-methyl modified nucleotide
  modified_base 10: mod_base = OTHER; note = 2'-O-methyl modified nucleotide
  modified_base 11: mod_base = OTHER; note = 2'-O-methyl modified nucleotide
  modified_base 12: mod_base = OTHER; note = 2'-O-methyl modified nucleotide
  modified_base 13: mod_base = OTHER; note = 2'-O-methyl modified nucleotide
  modified_base 14: mod_base = OTHER; note = 2'-fluoro modified nucleotide
  modified_base 15: mod_base = OTHER; note = 2'-O-methyl modified nucleotide
  modified_base 16: mod_base = OTHER; note = 2'-O-methyl modified nucleotide
  modified_base 17: mod_base = OTHER; note = 2'-O-methyl modified nucleotide
  modified_base 18: mod_base = OTHER; note = 2'-O-methyl modified nucleotide
  modified_base 19: mod_base = OTHER; note = 2'-O-methyl modified nucleotide
  modified_base 20: mod_base = OTHER; note = 2'-O-methyl modified nucleotide
  modified_base 21: mod_base = OTHER; note = 2'-O-methyl modified nucleotide
  modified_base 22: mod_base = OTHER; note = 2'-fluoro modified nucleotide
  modified_base 23: mod_base = OTHER; note = 2'-fluoro modified nucleotide
  modified_base 24: mod_base = OTHER; note = 2'-fluoro modified nucleotide
  modified_base 25: mod_base = OTHER; note = 2'-O-methyl modified nucleotide
  modified_base 26: mod_base = OTHER; note = 2'-O-methyl modified nucleotide
  modified_base 27: mod_base = OTHER; note = 2'-O-methyl modified nucleotide
  modified_base 28: mod_base = OTHER; note = 2'-O-methyl modified nucleotide
  modified_base 29: mod_base = OTHER; note = 2'-O-methyl modified nucleotide
  modified_base 30: mod_base = OTHER; note = 2'-O-methyl modified nucleotide
  modified_base 31: mod_base = OTHER; note = 2'-O-methyl modified nucleotide
  modified_base 32: mod_base = OTHER; note = 2'-O-methyl modified nucleotide
  modified_base 33: mod_base = OTHER; note = 2'-O-methyl modified nucleotide
  misc_difference 34: note = 2'-O-methyl modified nucleotide may be trivalent N-acetylgalactosamine modified
nagggcaacgtcatagtcatatgacgttgcccta

SEQ ID NO: 1627 - RNA, 34 nt, synthetic construct
  source 1..34: mol_type = other RNA
  misc_difference 1: note = 2'-O-methyl modified nucleotide may be 5' phosphate modified
  modified_base 2: mod_base = OTHER; note = 2'-fluoro modified nucleotide
  modified_base 3: mod_base = OTHER; note = 2'-O-methyl modified nucleotide
  modified_base 4: mod_base = OTHER; note = 2'-O-methyl modified nucleotide
  modified_base 5: mod_base = OTHER; note = 2'-O-methyl modified nucleotide
  modified_base 6: mod_base = OTHER; note = 2'-O-methyl modified nucleotide
  modified_base 7: mod_base = OTHER; note = 2'-O-methyl modified nucleotide
  modified_base 8: mod_base = OTHER; note = 2'-O-methyl modified nucleotide
  modified_base 9: mod_base = OTHER; note = 2'-O-methyl modified nucleotide
  modified_base 10: mod_base = OTHER; note = 2'-O-methyl modified nucleotide
  modified_base 11: mod_base = OTHER; note = 2'-O-methyl modified nucleotide
  modified_base 12: mod_base = OTHER; note = 2'-O-methyl modified nucleotide
  modified_base 13: mod_base = OTHER; note = 2'-O-methyl modified nucleotide
  modified_base 14: mod_base = OTHER; note = 2'-fluoro modified nucleotide
  modified_base 15: mod_base = OTHER; note = 2'-O-methyl modified nucleotide
  modified_base 16: mod_base = OTHER; note = 2'-O-methyl modified nucleotide
  modified_base 17: mod_base = OTHER; note = 2'-O-methyl modified nucleotide
  modified_base 18: mod_base = OTHER; note = 2'-O-methyl modified nucleotide
  modified_base 19: mod_base = OTHER; note = 2'-O-methyl modified nucleotide
  modified_base 20: mod_base = OTHER; note = 2'-O-methyl modified nucleotide
  modified_base 21: mod_base = OTHER; note = 2'-O-methyl modified nucleotide
  modified_base 22: mod_base = OTHER; note = 2'-fluoro modified nucleotide
  modified_base 23: mod_base = OTHER; note = 2'-fluoro modified nucleotide
  modified_base 24: mod_base = OTHER; note = 2'-fluoro modified nucleotide
  modified_base 25: mod_base = OTHER; note = 2'-O-methyl modified nucleotide
  modified_base 26: mod_base = OTHER; note = 2'-O-methyl modified nucleotide
  modified_base 27: mod_base = OTHER; note = 2'-O-methyl modified nucleotide
  modified_base 28: mod_base = OTHER; note = 2'-O-methyl modified nucleotide
  modified_base 29: mod_base = OTHER; note = 2'-O-methyl modified nucleotide
  modified_base 30: mod_base = OTHER; note = 2'-O-methyl modified nucleotide
  modified_base 31: mod_base = OTHER; note = 2'-O-methyl modified nucleotide
  modified_base 32: mod_base = OTHER; note = 2'-O-methyl modified nucleotide
  modified_base 33: mod_base = OTHER; note = 2'-O-methyl modified nucleotide
  misc_difference 34: note = 2'-O-methyl modified nucleotide may be trivalent N-acetylgalactosamine modified
nagacctagacctggtcacccaggtctaggtcta

SEQ ID NO: 1628 - RNA, 34 nt, synthetic construct
  source 1..34: mol_type = other RNA
  misc_difference 1: note = 2'-O-methyl modified nucleotide may be 5' phosphate modified
  modified_base 2: mod_base = OTHER; note = 2'-fluoro modified nucleotide
  modified_base 3: mod_base = OTHER; note = 2'-O-methyl modified nucleotide
  modified_base 4: mod_base = OTHER; note = 2'-O-methyl modified nucleotide
  modified_base 5: mod_base = OTHER; note = 2'-O-methyl modified nucleotide
  modified_base 6: mod_base = OTHER; note = 2'-O-methyl modified nucleotide
  modified_base 7: mod_base = OTHER; note = 2'-O-methyl modified nucleotide
  modified_base 8: mod_base = OTHER; note = 2'-O-methyl modified nucleotide
  modified_base 9: mod_base = OTHER; note = 2'-O-methyl modified nucleotide
  modified_base 10: mod_base = OTHER; note = 2'-O-methyl modified nucleotide
  modified_base 11: mod_base = OTHER; note = 2'-O-methyl modified nucleotide
  modified_base 12: mod_base = OTHER; note = 2'-O-methyl modified nucleotide
  modified_base 13: mod_base = OTHER; note = 2'-O-methyl modified nucleotide
  modified_base 14: mod_base = OTHER; note = 2'-fluoro modified nucleotide
  modified_base 15: mod_base = OTHER; note = 2'-O-methyl modified nucleotide
  modified_base 16: mod_base = OTHER; note = 2'-O-methyl modified nucleotide
  modified_base 17: mod_base = OTHER; note = 2'-O-methyl modified nucleotide
  modified_base 18: mod_base = OTHER; note = 2'-O-methyl modified nucleotide
  modified_base 19: mod_base = OTHER; note = 2'-O-methyl modified nucleotide
  modified_base 20: mod_base = OTHER; note = 2'-O-methyl modified nucleotide
  modified_base 21: mod_base = OTHER; note = 2'-O-methyl modified nucleotide
  modified_base 22: mod_base = OTHER; note = 2'-fluoro modified nucleotide
  modified_base 23: mod_base = OTHER; note = 2'-fluoro modified nucleotide
  modified_base 24: mod_base = OTHER; note = 2'-fluoro modified nucleotide
  modified_base 25: mod_base = OTHER; note = 2'-O-methyl modified nucleotide
  modified_base 26: mod_base = OTHER; note = 2'-O-methyl modified nucleotide
  modified_base 27: mod_base = OTHER; note = 2'-O-methyl modified nucleotide
  modified_base 28: mod_base = OTHER; note = 2'-O-methyl modified nucleotide
  modified_base 29: mod_base = OTHER; note = 2'-O-methyl modified nucleotide
  modified_base 30: mod_base = OTHER; note = 2'-O-methyl modified nucleotide
  modified_base 31: mod_base = OTHER; note = 2'-O-methyl modified nucleotide
  modified_base 32: mod_base = OTHER; note = 2'-O-methyl modified nucleotide
  modified_base 33: mod_base = OTHER; note = 2'-O-methyl modified nucleotide
  misc_difference 34: note = 2'-O-methyl modified nucleotide may be trivalent N-acetylgalactosamine modified
nagtactcagacaccacagggtgtctgagtacta

SEQ ID NO: 1629 - RNA, 34 nt, synthetic construct
  source 1..34: mol_type = other RNA
  misc_difference 1: note = 2'-O-methyl modified nucleotide may be 5' phosphate modified
  modified_base 2: mod_base = OTHER; note = 2'-fluoro modified nucleotide
  modified_base 3: mod_base = OTHER; note = 2'-O-methyl modified nucleotide
  modified_base 4: mod_base = OTHER; note = 2'-O-methyl modified nucleotide
  modified_base 5: mod_base = OTHER; note = 2'-O-methyl modified nucleotide
  modified_base 6: mod_base = OTHER; note = 2'-O-methyl modified nucleotide
  modified_base 7: mod_base = OTHER; note = 2'-O-methyl modified nucleotide
  modified_base 8: mod_base = OTHER; note = 2'-O-methyl modified nucleotide
  modified_base 9: mod_base = OTHER; note = 2'-O-methyl modified nucleotide
  modified_base 10: mod_base = OTHER; note = 2'-O-methyl modified nucleotide
  modified_base 11: mod_base = OTHER; note = 2'-O-methyl modified nucleotide
  modified_base 12: mod_base = OTHER; note = 2'-O-methyl modified nucleotide
  modified_base 13: mod_base = OTHER; note = 2'-O-methyl modified nucleotide
  modified_base 14: mod_base = OTHER; note = 2'-fluoro modified nucleotide
  modified_base 15: mod_base = OTHER; note = 2'-O-methyl modified nucleotide
  modified_base 16: mod_base = OTHER; note = 2'-O-methyl modified nucleotide
  modified_base 17: mod_base = OTHER; note = 2'-O-methyl modified nucleotide
  modified_base 18: mod_base = OTHER; note = 2'-O-methyl modified nucleotide
  modified_base 19: mod_base = OTHER; note = 2'-O-methyl modified nucleotide
  modified_base 20: mod_base = OTHER; note = 2'-O-methyl modified nucleotide
  modified_base 21: mod_base = OTHER; note = 2'-O-methyl modified nucleotide
  modified_base 22: mod_base = OTHER; note = 2'-fluoro modified nucleotide
  modified_base 23: mod_base = OTHER; note = 2'-fluoro modified nucleotide
  modified_base 24: mod_base = OTHER; note = 2'-fluoro modified nucleotide
  modified_base 25: mod_base = OTHER; note = 2'-O-methyl modified nucleotide
  modified_base 26: mod_base = OTHER; note = 2'-O-methyl modified nucleotide
  modified_base 27: mod_base = OTHER; note = 2'-O-methyl modified nucleotide
  modified_base 28: mod_base = OTHER; note = 2'-O-methyl modified nucleotide
  modified_base 29: mod_base = OTHER; note = 2'-O-methyl modified nucleotide
  modified_base 30: mod_base = OTHER; note = 2'-O-methyl modified nucleotide
  modified_base 31: mod_base = OTHER; note = 2'-O-methyl modified nucleotide
  modified_base 32: mod_base = OTHER; note = 2'-O-methyl modified nucleotide
  modified_base 33: mod_base = OTHER; note = 2'-O-methyl modified nucleotide
  misc_difference 34: note = 2'-O-methyl modified nucleotide may be trivalent N-acetylgalactosamine modified
naaggctccgtcccgctcccgggacggagcctta

SEQ ID NO: 1630 - RNA, 34 nt, synthetic construct
  source 1..34: mol_type = other RNA
  misc_difference 1: note = 2'-O-methyl modified nucleotide may be 5' phosphate modified
  modified_base 2: mod_base = OTHER; note = 2'-fluoro modified nucleotide
  modified_base 3: mod_base = OTHER; note = 2'-O-methyl modified nucleotide
  modified_base 4: mod_base = OTHER; note = 2'-O-methyl modified nucleotide
  modified_base 5: mod_base = OTHER; note = 2'-O-methyl modified nucleotide
  modified_base 6: mod_base = OTHER; note = 2'-O-methyl modified nucleotide
  modified_base 7: mod_base = OTHER; note = 2'-O-methyl modified nucleotide
  modified_base 8: mod_base = OTHER; note = 2'-O-methyl modified nucleotide
  modified_base 9: mod_base = OTHER; note = 2'-O-methyl modified nucleotide
  modified_base 10: mod_base = OTHER; note = 2'-O-methyl modified nucleotide
  modified_base 11: mod_base = OTHER; note = 2'-O-methyl modified nucleotide
  modified_base 12: mod_base = OTHER; note = 2'-O-methyl modified nucleotide
  modified_base 13: mod_base = OTHER; note = 2'-O-methyl modified nucleotide
  modified_base 14: mod_base = OTHER; note = 2'-fluoro modified nucleotide
  modified_base 15: mod_base = OTHER; note = 2'-O-methyl modified nucleotide
  modified_base 16: mod_base = OTHER; note = 2'-O-methyl modified nucleotide
  modified_base 17: mod_base = OTHER; note = 2'-O-methyl modified nucleotide
  modified_base 18: mod_base = OTHER; note = 2'-O-methyl modified nucleotide
  modified_base 19: mod_base = OTHER; note = 2'-O-methyl modified nucleotide
  modified_base 20: mod_base = OTHER; note = 2'-O-methyl modified nucleotide
  modified_base 21: mod_base = OTHER; note = 2'-O-methyl modified nucleotide
  modified_base 22: mod_base = OTHER; note = 2'-fluoro modified nucleotide
  modified_base 23: mod_base = OTHER; note = 2'-fluoro modified nucleotide
  modified_base 24: mod_base = OTHER; note = 2'-fluoro modified nucleotide
  modified_base 25: mod_base = OTHER; note = 2'-O-methyl modified nucleotide
  modified_base 26: mod_base = OTHER; note = 2'-O-methyl modified nucleotide
  modified_base 27: mod_base = OTHER; note = 2'-O-methyl modified nucleotide
  modified_base 28: mod_base = OTHER; note = 2'-O-methyl modified nucleotide
  modified_base 29: mod_base = OTHER; note = 2'-O-methyl modified nucleotide
  modified_base 30: mod_base = OTHER; note = 2'-O-methyl modified nucleotide
  modified_base 31: mod_base = OTHER; note = 2'-O-methyl modified nucleotide
  modified_base 32: mod_base = OTHER; note = 2'-O-methyl modified nucleotide
  modified_base 33: mod_base = OTHER; note = 2'-O-methyl modified nucleotide
  misc_difference 34: note = 2'-O-methyl modified nucleotide may be trivalent N-acetylgalactosamine modified
ngggcaacgtcatagtcatctatgacgttgccca

SEQ ID NO: 1631 - RNA, 34 nt, synthetic construct
  source 1..34: mol_type = other RNA
  misc_difference 1: note = 2'-O-methyl modified nucleotide may be 5' phosphate modified
  modified_base 2: mod_base = OTHER; note = 2'-fluoro modified nucleotide
  modified_base 3: mod_base = OTHER; note = 2'-O-methyl modified nucleotide
  modified_base 4: mod_base = OTHER; note = 2'-O-methyl modified nucleotide
  modified_base 5: mod_base = OTHER; note = 2'-O-methyl modified nucleotide
  modified_base 6: mod_base = OTHER; note = 2'-O-methyl modified nucleotide
  modified_base 7: mod_base = OTHER; note = 2'-O-methyl modified nucleotide
  modified_base 8: mod_base = OTHER; note = 2'-O-methyl modified nucleotide
  modified_base 9: mod_base = OTHER; note = 2'-O-methyl modified nucleotide
  modified_base 10: mod_base = OTHER; note = 2'-O-methyl modified nucleotide
  modified_base 11: mod_base = OTHER; note = 2'-O-methyl modified nucleotide
  modified_base 12: mod_base = OTHER; note = 2'-O-methyl modified nucleotide
  modified_base 13: mod_base = OTHER; note = 2'-O-methyl modified nucleotide
  modified_base 14: mod_base = OTHER; note = 2'-fluoro modified nucleotide
  modified_base 15: mod_base = OTHER; note = 2'-O-methyl modified nucleotide
  modified_base 16: mod_base = OTHER; note = 2'-O-methyl modified nucleotide
  modified_base 17: mod_base = OTHER; note = 2'-O-methyl modified nucleotide
  modified_base 18: mod_base = OTHER; note = 2'-O-methyl modified nucleotide
  modified_base 19: mod_base = OTHER; note = 2'-O-methyl modified nucleotide
  modified_base 20: mod_base = OTHER; note = 2'-O-methyl modified nucleotide
  modified_base 21: mod_base = OTHER; note = 2'-O-methyl modified nucleotide
  modified_base 22: mod_base = OTHER; note = 2'-fluoro modified nucleotide
  modified_base 23: mod_base = OTHER; note = 2'-fluoro modified nucleotide
  modified_base 24: mod_base = OTHER; note = 2'-fluoro modified nucleotide
  modified_base 25: mod_base = OTHER; note = 2'-O-methyl modified nucleotide
  modified_base 26: mod_base = OTHER; note = 2'-O-methyl modified nucleotide
  modified_base 27: mod_base = OTHER; note = 2'-O-methyl modified nucleotide
  modified_base 28: mod_base = OTHER; note = 2'-O-methyl modified nucleotide
  modified_base 29: mod_base = OTHER; note = 2'-O-methyl modified nucleotide
  modified_base 30: mod_base = OTHER; note = 2'-O-methyl modified nucleotide
  modified_base 31: mod_base = OTHER; note = 2'-O-methyl modified nucleotide
  modified_base 32: mod_base = OTHER; note = 2'-O-methyl modified nucleotide
  modified_base 33: mod_base = OTHER; note = 2'-O-methyl modified nucleotide
  misc_difference 34: note = 2'-O-methyl modified nucleotide may be trivalent N-acetylgalactosamine modified
nctgttttaattcaatcccttgaattaaaacaga

SEQ ID NO: 1632 - RNA, 34 nt, synthetic construct
  source 1..34: mol_type = other RNA
  misc_difference 1: note = 2'-O-methyl modified nucleotide may be 5' phosphate modified
  modified_base 2: mod_base = OTHER; note = 2'-fluoro modified nucleotide
  modified_base 3: mod_base = OTHER; note = 2'-O-methyl modified nucleotide
  modified_base 4: mod_base = OTHER; note = 2'-O-methyl modified nucleotide
  modified_base 5: mod_base = OTHER; note = 2'-O-methyl modified nucleotide
  modified_base 6: mod_base = OTHER; note = 2'-O-methyl modified nucleotide
  modified_base 7: mod_base = OTHER; note = 2'-O-methyl modified nucleotide
  modified_base 8: mod_base = OTHER; note = 2'-O-methyl modified nucleotide
  modified_base 9: mod_base = OTHER; note = 2'-O-methyl modified nucleotide
  modified_base 10: mod_base = OTHER; note = 2'-O-methyl modified nucleotide
  modified_base 11: mod_base = OTHER; note = 2'-O-methyl modified nucleotide
  modified_base 12: mod_base = OTHER; note = 2'-O-methyl modified nucleotide
  modified_base 13: mod_base = OTHER; note = 2'-O-methyl modified nucleotide
  modified_base 14: mod_base = OTHER; note = 2'-fluoro modified nucleotide
  modified_base 15: mod_base = OTHER; note = 2'-O-methyl modified nucleotide
  modified_base 16: mod_base = OTHER; note = 2'-O-methyl modified nucleotide
  modified_base 17: mod_base = OTHER; note = 2'-O-methyl modified nucleotide
  modified_base 18: mod_base = OTHER; note = 2'-O-methyl modified nucleotide
  modified_base 19: mod_base = OTHER; note = 2'-O-methyl modified nucleotide
  modified_base 20: mod_base = OTHER; note = 2'-O-methyl modified nucleotide
  modified_base 21: mod_base = OTHER; note = 2'-O-methyl modified nucleotide
  modified_base 22: mod_base = OTHER; note = 2'-fluoro modified nucleotide
  modified_base 23: mod_base = OTHER; note = 2'-fluoro modified nucleotide
  modified_base 24: mod_base = OTHER; note = 2'-fluoro modified nucleotide
  modified_base 25: mod_base = OTHER; note = 2'-O-methyl modified nucleotide
  modified_base 26: mod_base = OTHER; note = 2'-O-methyl modified nucleotide
  modified_base 27: mod_base = OTHER; note = 2'-O-methyl modified nucleotide
  modified_base 28: mod_base = OTHER; note = 2'-O-methyl modified nucleotide
  modified_base 29: mod_base = OTHER; note = 2'-O-methyl modified nucleotide
  modified_base 30: mod_base = OTHER; note = 2'-O-methyl modified nucleotide
  modified_base 31: mod_base = OTHER; note = 2'-O-methyl modified nucleotide
  modified_base 32: mod_base = OTHER; note = 2'-O-methyl modified nucleotide
  modified_base 33: mod_base = OTHER; note = 2'-O-methyl modified nucleotide
  misc_difference 34: note = 2'-O-methyl modified nucleotide may be trivalent N-acetylgalactosamine modified
nagagatctcatcactcacgtgatgagatctcta

SEQ ID NO: 1633 - RNA, 34 nt, synthetic construct
  source 1..34: mol_type = other RNA
  misc_difference 1: note = 2'-O-methyl modified nucleotide may be 5' phosphate modified
  modified_base 2: mod_base = OTHER; note = 2'-fluoro modified nucleotide
  modified_base 3: mod_base = OTHER; note = 2'-O-methyl modified nucleotide
  modified_base 4: mod_base = OTHER; note = 2'-O-methyl modified nucleotide
  modified_base 5: mod_base = OTHER; note = 2'-O-methyl modified nucleotide
  modified_base 6: mod_base = OTHER; note = 2'-O-methyl modified nucleotide
  modified_base 7: mod_base = OTHER; note = 2'-O-methyl modified nucleotide
  modified_base 8: mod_base = OTHER; note = 2'-O-methyl modified nucleotide
  modified_base 9: mod_base = OTHER; note = 2'-O-methyl modified nucleotide
  modified_base 10: mod_base = OTHER; note = 2'-O-methyl modified nucleotide
  modified_base 11: mod_base = OTHER; note = 2'-O-methyl modified nucleotide
  modified_base 12: mod_base = OTHER; note = 2'-O-methyl modified nucleotide
  modified_base 13: mod_base = OTHER; note = 2'-O-methyl modified nucleotide
  modified_base 14: mod_base = OTHER; note = 2'-fluoro modified nucleotide
  modified_base 15: mod_base = OTHER; note = 2'-O-methyl modified nucleotide
  modified_base 16: mod_base = OTHER; note = 2'-O-methyl modified nucleotide
  modified_base 17: mod_base = OTHER; note = 2'-O-methyl modified nucleotide
  modified_base 18: mod_base = OTHER; note = 2'-O-methyl modified nucleotide
  modified_base 19: mod_base = OTHER; note = 2'-O-methyl modified nucleotide
  modified_base 20: mod_base = OTHER; note = 2'-O-methyl modified nucleotide
  modified_base 21: mod_base = OTHER; note = 2'-O-methyl modified nucleotide
  modified_base 22: mod_base = OTHER; note = 2'-fluoro modified nucleotide
  modified_base 23: mod_base = OTHER; note = 2'-fluoro modified nucleotide
  modified_base 24: mod_base = OTHER; note = 2'-fluoro modified nucleotide
  modified_base 25: mod_base = OTHER; note = 2'-O-methyl modified nucleotide
  modified_base 26: mod_base = OTHER; note = 2'-O-methyl modified nucleotide
  modified_base 27: mod_base = OTHER; note = 2'-O-methyl modified nucleotide
  modified_base 28: mod_base = OTHER; note = 2'-O-methyl modified nucleotide
  modified_base 29: mod_base = OTHER; note = 2'-O-methyl modified nucleotide
  modified_base 30: mod_base = OTHER; note = 2'-O-methyl modified nucleotide
  modified_base 31: mod_base = OTHER; note = 2'-O-methyl modified nucleotide
  modified_base 32: mod_base = OTHER; note = 2'-O-methyl modified nucleotide
  modified_base 33: mod_base = OTHER; note = 2'-O-methyl modified nucleotide
  misc_difference 34: note = 2'-O-methyl modified nucleotide may be trivalent N-acetylgalactosamine modified
nggtcttcataattgatttcaattatgaagacca

SEQ ID NO: 1634 - RNA, 34 nt, synthetic construct
  source 1..34: mol_type = other RNA
  misc_difference 1: note = 2'-O-methyl modified nucleotide may be 5' phosphate modified
  modified_base 2: mod_base = OTHER; note = 2'-fluoro modified nucleotide
  modified_base 3: mod_base = OTHER; note = 2'-O-methyl modified nucleotide
  modified_base 4: mod_base = OTHER; note = 2'-O-methyl modified nucleotide
  modified_base 5: mod_base = OTHER; note = 2'-O-methyl modified nucleotide
  modified_base 6: mod_base = OTHER; note = 2'-O-methyl modified nucleotide
  modified_base 7: mod_base = OTHER; note = 2'-O-methyl modified nucleotide
  modified_base 8: mod_base = OTHER; note = 2'-O-methyl modified nucleotide
  modified_base 9: mod_base = OTHER; note = 2'-O-methyl modified nucleotide
  modified_base 10: mod_base = OTHER; note = 2'-O-methyl modified nucleotide
  modified_base 11: mod_base = OTHER; note = 2'-O-methyl modified nucleotide
  modified_base 12: mod_base = OTHER; note = 2'-O-methyl modified nucleotide
  modified_base 13: mod_base = OTHER; note = 2'-O-methyl modified nucleotide
  modified_base 14: mod_base = OTHER; note = 2'-fluoro modified nucleotide
  modified_base 15: mod_base = OTHER; note = 2'-O-methyl modified nucleotide
  modified_base 16: mod_base = OTHER; note = 2'-O-methyl modified nucleotide
  modified_base 17: mod_base = OTHER; note = 2'-O-methyl modified nucleotide
  modified_base 18: mod_base = OTHER; note = 2'-O-methyl modified nucleotide
  modified_base 19: mod_base = OTHER; note = 2'-O-methyl modified nucleotide
  modified_base 20: mod_base = OTHER; note = 2'-O-methyl modified nucleotide
  modified_base 21: mod_base = OTHER; note = 2'-O-methyl modified nucleotide
  modified_base 22: mod_base = OTHER; note = 2'-fluoro modified nucleotide
  modified_base 23: mod_base = OTHER; note = 2'-fluoro modified nucleotide
  modified_base 24: mod_base = OTHER; note = 2'-fluoro modified nucleotide
  modified_base 25: mod_base = OTHER; note = 2'-O-methyl modified nucleotide
  modified_base 26: mod_base = OTHER; note = 2'-O-methyl modified nucleotide
  modified_base 27: mod_base = OTHER; note = 2'-O-methyl modified nucleotide
  modified_base 28: mod_base = OTHER; note = 2'-O-methyl modified nucleotide
  modified_base 29: mod_base = OTHER; note = 2'-O-methyl modified nucleotide
  modified_base 30: mod_base = OTHER; note = 2'-O-methyl modified nucleotide
  modified_base 31: mod_base = OTHER; note = 2'-O-methyl modified nucleotide
  modified_base 32: mod_base = OTHER; note = 2'-O-methyl modified nucleotide
  modified_base 33: mod_base = OTHER; note = 2'-O-methyl modified nucleotide
  misc_difference 34: note = 2'-O-methyl modified nucleotide may be trivalent N-acetylgalactosamine modified
ncatatcttggcttcacacgaagccaagatatga

SEQ ID NO: 1635 - RNA, 34 nt, synthetic construct
  source 1..34: mol_type = other RNA
  misc_difference 1: note = 2'-O-methyl modified nucleotide may be 5' phosphate modified
  modified_base 2: mod_base = OTHER; note = 2'-fluoro modified nucleotide
  modified_base 3: mod_base = OTHER; note = 2'-O-methyl modified nucleotide
  modified_base 4: mod_base = OTHER; note = 2'-O-methyl modified nucleotide
  modified_base 5: mod_base = OTHER; note = 2'-O-methyl modified nucleotide
  modified_base 6: mod_base = OTHER; note = 2'-O-methyl modified nucleotide
  modified_base 7: mod_base = OTHER; note = 2'-O-methyl modified nucleotide
  modified_base 8: mod_base = OTHER; note = 2'-O-methyl modified nucleotide
  modified_base 9: mod_base = OTHER; note = 2'-O-methyl modified nucleotide
  modified_base 10: mod_base = OTHER; note = 2'-O-methyl modified nucleotide
  modified_base 11: mod_base = OTHER; note = 2'-O-methyl modified nucleotide
  modified_base 12: mod_base = OTHER; note = 2'-O-methyl modified nucleotide
  modified_base 13: mod_base = OTHER; note = 2'-O-methyl modified nucleotide
  modified_base 14: mod_base = OTHER; note = 2'-fluoro modified nucleotide
  modified_base 15: mod_base = OTHER; note = 2'-O-methyl modified nucleotide
  modified_base 16: mod_base = OTHER; note = 2'-O-methyl modified nucleotide
  modified_base 17: mod_base = OTHER; note = 2'-O-methyl modified nucleotide
  modified_base 18: mod_base = OTHER; note = 2'-O-methyl modified nucleotide
  modified_base 19: mod_base = OTHER; note = 2'-O-methyl modified nucleotide
  modified_base 20: mod_base = OTHER; note = 2'-O-methyl modified nucleotide
  modified_base 21: mod_base = OTHER; note = 2'-O-methyl modified nucleotide
  modified_base 22: mod_base = OTHER; note = 2'-fluoro modified nucleotide
  modified_base 23: mod_base = OTHER; note = 2'-fluoro modified nucleotide
  modified_base 24: mod_base = OTHER; note = 2'-fluoro modified nucleotide
  modified_base 25: mod_base = OTHER; note = 2'-O-methyl modified nucleotide
  modified_base 26: mod_base = OTHER; note = 2'-O-methyl modified nucleotide
  modified_base 27: mod_base = OTHER; note = 2'-O-methyl modified nucleotide
  modified_base 28: mod_base = OTHER; note = 2'-O-methyl modified nucleotide
  modified_base 29: mod_base = OTHER; note = 2'-O-methyl modified nucleotide
  modified_base 30: mod_base = OTHER; note = 2'-O-methyl modified nucleotide
  modified_base 31: mod_base = OTHER; note = 2'-O-methyl modified nucleotide
  modified_base 32: mod_base = OTHER; note = 2'-O-methyl modified nucleotide
  modified_base 33: mod_base = OTHER; note = 2'-O-methyl modified nucleotide
  misc_difference 34: note = 2'-O-methyl modified nucleotide may be trivalent N-acetylgalactosamine modified
ncaccaacttgaatgaaaccattcaagttggtga

SEQ ID NO: 1636 - RNA, 34 nt, synthetic construct
  source 1..34: mol_type = other RNA
  misc_difference 1: note = 2'-O-methyl modified nucleotide may be 5' phosphate modified
  modified_base 2: mod_base = OTHER; note = 2'-fluoro modified nucleotide
  modified_base 3: mod_base = OTHER; note = 2'-O-methyl modified nucleotide
  modified_base 4: mod_base = OTHER; note = 2'-O-methyl modified nucleotide
  modified_base 5: mod_base = OTHER; note = 2'-O-methyl modified nucleotide
  modified_base 6: mod_base = OTHER; note = 2'-O-methyl modified nucleotide
  modified_base 7: mod_base = OTHER; note = 2'-O-methyl modified nucleotide
  modified_base 8: mod_base = OTHER; note = 2'-O-methyl modified nucleotide
  modified_base 9: mod_base = OTHER; note = 2'-O-methyl modified nucleotide
  modified_base 10: mod_base = OTHER; note = 2'-O-methyl modified nucleotide
  modified_base 11: mod_base = OTHER; note = 2'-O-methyl modified nucleotide
  modified_base 12: mod_base = OTHER; note = 2'-O-methyl modified nucleotide
  modified_base 13: mod_base = OTHER; note = 2'-O-methyl modified nucleotide
  modified_base 14: mod_base = OTHER; note = 2'-fluoro modified nucleotide
  modified_base 15: mod_base = OTHER; note = 2'-O-methyl modified nucleotide
  modified_base 16: mod_base = OTHER; note = 2'-O-methyl modified nucleotide
  modified_base 17: mod_base = OTHER; note = 2'-O-methyl modified nucleotide
  modified_base 18: mod_base = OTHER; note = 2'-O-methyl modified nucleotide
  modified_base 19: mod_base = OTHER; note = 2'-O-methyl modified nucleotide
  modified_base 20: mod_base = OTHER; note = 2'-O-methyl modified nucleotide
  modified_base 21: mod_base = OTHER; note = 2'-O-methyl modified nucleotide
  modified_base 22: mod_base = OTHER; note = 2'-fluoro modified nucleotide
  modified_base 23: mod_base = OTHER; note = 2'-fluoro modified nucleotide
  modified_base 24: mod_base = OTHER; note = 2'-fluoro modified nucleotide
  modified_base 25: mod_base = OTHER; note = 2'-O-methyl modified nucleotide
  modified_base 26: mod_base = OTHER; note = 2'-O-methyl modified nucleotide
  modified_base 27: mod_base = OTHER; note = 2'-O-methyl modified nucleotide
  modified_base 28: mod_base = OTHER; note = 2'-O-methyl modified nucleotide
  modified_base 29: mod_base = OTHER; note = 2'-O-methyl modified nucleotide
  modified_base 30: mod_base = OTHER; note = 2'-O-methyl modified nucleotide
  modified_base 31: mod_base = OTHER; note = 2'-O-methyl modified nucleotide
  modified_base 32: mod_base = OTHER; note = 2'-O-methyl modified nucleotide
  modified_base 33: mod_base = OTHER; note = 2'-O-methyl modified nucleotide
  misc_difference 34: note = 2'-O-methyl modified nucleotide may be trivalent N-acetylgalactosamine modified
nagctgttttaattcaatcgaattaaaacagcta

SEQ ID NO: 1637 - RNA, 34 nt, synthetic construct
  source 1..34: mol_type = other RNA
  misc_difference 1: note = 2'-O-methyl modified nucleotide may be 5' phosphate modified
  modified_base 2: mod_base = OTHER; note = 2'-fluoro modified nucleotide
  modified_base 3: mod_base = OTHER; note = 2'-O-methyl modified nucleotide
  modified_base 4: mod_base = OTHER; note = 2'-O-methyl modified nucleotide
  modified_base 5: mod_base = OTHER; note = 2'-O-methyl modified nucleotide
  modified_base 6: mod_base = OTHER; note = 2'-O-methyl modified nucleotide
  modified_base 7: mod_base = OTHER; note = 2'-O-methyl modified nucleotide
  modified_base 8: mod_base = OTHER; note = 2'-O-methyl modified nucleotide
  modified_base 9: mod_base = OTHER; note = 2'-O-methyl modified nucleotide
  modified_base 10: mod_base = OTHER; note = 2'-O-methyl modified nucleotide
  modified_base 11: mod_base = OTHER; note = 2'-O-methyl modified nucleotide
  modified_base 12: mod_base = OTHER; note = 2'-O-methyl modified nucleotide
  modified_base 13: mod_base = OTHER; note = 2'-O-methyl modified nucleotide
  modified_base 14: mod_base = OTHER; note = 2'-fluoro modified nucleotide
  modified_base 15: mod_base = OTHER; note = 2'-O-methyl modified nucleotide
  modified_base 16: mod_base = OTHER; note = 2'-O-methyl modified nucleotide
  modified_base 17: mod_base = OTHER; note = 2'-O-methyl modified nucleotide
  modified_base 18: mod_base = OTHER; note = 2'-O-methyl modified nucleotide
  modified_base 19: mod_base = OTHER; note = 2'-O-methyl modified nucleotide
  modified_base 20: mod_base = OTHER; note = 2'-O-methyl modified nucleotide
  modified_base 21: mod_base = OTHER; note = 2'-O-methyl modified nucleotide
  modified_base 22: mod_base = OTHER; note = 2'-fluoro modified nucleotide
  modified_base 23: mod_base = OTHER; note = 2'-fluoro modified nucleotide
  modified_base 24: mod_base = OTHER; note = 2'-fluoro modified nucleotide
  modified_base 25: mod_base = OTHER; note = 2'-O-methyl modified nucleotide
  modified_base 26: mod_base = OTHER; note = 2'-O-methyl modified nucleotide
  modified_base 27: mod_base = OTHER; note = 2'-O-methyl modified nucleotide
  modified_base 28: mod_base = OTHER; note = 2'-O-methyl modified nucleotide
  modified_base 29: mod_base = OTHER; note = 2'-O-methyl modified nucleotide
  modified_base 30: mod_base = OTHER; note = 2'-O-methyl modified nucleotide
  modified_base 31: mod_base = OTHER; note = 2'-O-methyl modified nucleotide
  modified_base 32: mod_base = OTHER; note = 2'-O-methyl modified nucleotide
  modified_base 33: mod_base = OTHER; note = 2'-O-methyl modified nucleotide
  misc_difference 34: note = 2'-O-methyl modified nucleotide may be trivalent N-acetylgalactosamine modified
ntaacttgccaccttctcaaaggtggcaagttaa

SEQ ID NO: 1638 - RNA, 34 nt, synthetic construct
  source 1..34: mol_type = other RNA
  misc_difference 1: note = 2'-O-methyl modified nucleotide may be 5' phosphate modified
  modified_base 2: mod_base = OTHER; note = 2'-fluoro modified nucleotide
  modified_base 3: mod_base = OTHER; note = 2'-O-methyl modified nucleotide
  modified_base 4: mod_base = OTHER; note = 2'-O-methyl modified nucleotide
  modified_base 5: mod_base = OTHER; note = 2'-O-methyl modified nucleotide
  modified_base 6: mod_base = OTHER; note = 2'-O-methyl modified nucleotide
  modified_base 7: mod_base = OTHER; note = 2'-O-methyl modified nucleotide
  modified_base 8: mod_base = OTHER; note = 2'-O-methyl modified nucleotide
  modified_base 9: mod_base = OTHER; note = 2'-O-methyl modified nucleotide
  modified_base 10: mod_base = OTHER; note = 2'-O-methyl modified nucleotide
  modified_base 11: mod_base = OTHER; note = 2'-O-methyl modified nucleotide
  modified_base 12: mod_base = OTHER; note = 2'-O-methyl modified nucleotide
  modified_base 13: mod_base = OTHER; note = 2'-O-methyl modified nucleotide
  modified_base 14: mod_base = OTHER; note = 2'-fluoro modified nucleotide
  modified_base 15: mod_base = OTHER; note = 2'-O-methyl modified nucleotide
  modified_base 16: mod_base = OTHER; note = 2'-O-methyl modified nucleotide
  modified_base 17: mod_base = OTHER; note = 2'-O-methyl modified nucleotide
  modified_base 18: mod_base = OTHER; note = 2'-O-methyl modified nucleotide
  modified_base 19: mod_base = OTHER; note = 2'-O-methyl modified nucleotide
  modified_base 20: mod_base = OTHER; note = 2'-O-methyl modified nucleotide
  modified_base 21: mod_base = OTHER; note = 2'-O-methyl modified nucleotide
  modified_base 22: mod_base = OTHER; note = 2'-fluoro modified nucleotide
  modified_base 23: mod_base = OTHER; note = 2'-fluoro modified nucleotide
  modified_base 24: mod_base = OTHER; note = 2'-fluoro modified nucleotide
  modified_base 25: mod_base = OTHER; note = 2'-O-methyl modified nucleotide
  modified_base 26: mod_base = OTHER; note = 2'-O-methyl modified nucleotide
  modified_base 27: mod_base = OTHER; note = 2'-O-methyl modified nucleotide
  modified_base 28: mod_base = OTHER; note = 2'-O-methyl modified nucleotide
  modified_base 29: mod_base = OTHER; note = 2'-O-methyl modified nucleotide
  modified_base 30: mod_base = OTHER; note = 2'-O-methyl modified nucleotide
  modified_base 31: mod_base = OTHER; note = 2'-O-methyl modified nucleotide
  modified_base 32: mod_base = OTHER; note = 2'-O-methyl modified nucleotide
  modified_base 33: mod_base = OTHER; note = 2'-O-methyl modified nucleotide
  misc_difference 34: note = 2'-O-methyl modified nucleotide may be trivalent N-acetylgalactosamine modified
ntgagcaggtacctgctttcaggtacctgctcaa

SEQ ID NO: 1639 - RNA, 34 nt, synthetic construct
  source 1..34: mol_type = other RNA
  misc_difference 1: note = 2'-O-methyl modified nucleotide may be 5' phosphate modified
  modified_base 2: mod_base = OTHER; note = 2'-fluoro modified nucleotide
  modified_base 3: mod_base = OTHER; note = 2'-O-methyl modified nucleotide
  modified_base 4: mod_base = OTHER; note = 2'-O-methyl modified nucleotide
  modified_base 5: mod_base = OTHER; note = 2'-O-methyl modified nucleotide
  modified_base 6: mod_base = OTHER; note = 2'-O-methyl modified nucleotide
  modified_base 7: mod_base = OTHER; note = 2'-O-methyl modified nucleotide
  modified_base 8: mod_base = OTHER; note = 2'-O-methyl modified nucleotide
  modified_base 9: mod_base = OTHER; note = 2'-O-methyl modified nucleotide
  modified_base 10: mod_base = OTHER; note = 2'-O-methyl modified nucleotide
  modified_base 11: mod_base = OTHER; note = 2'-O-methyl modified nucleotide
  modified_base 12: mod_base = OTHER; note = 2'-O-methyl modified nucleotide
  modified_base 13: mod_base = OTHER; note = 2'-O-methyl modified nucleotide
  modified_base 14: mod_base = OTHER; note = 2'-fluoro modified nucleotide
  modified_base 15: mod_base = OTHER; note = 2'-O-methyl modified nucleotide
  modified_base 16: mod_base = OTHER; note = 2'-O-methyl modified nucleotide
  modified_base 17: mod_base = OTHER; note = 2'-O-methyl modified nucleotide
  modified_base 18: mod_base = OTHER; note = 2'-O-methyl modified nucleotide
  modified_base 19: mod_base = OTHER; note = 2'-O-methyl modified nucleotide
  modified_base 20: mod_base = OTHER; note = 2'-O-methyl modified nucleotide
  modified_base 21: mod_base = OTHER; note = 2'-O-methyl modified nucleotide
  modified_base 22: mod_base = OTHER; note = 2'-fluoro modified nucleotide
  modified_base 23: mod_base = OTHER; note = 2'-fluoro modified nucleotide
  modified_base 24: mod_base = OTHER; note = 2'-fluoro modified nucleotide
  modified_base 25: mod_base = OTHER; note = 2'-O-methyl modified nucleotide
  modified_base 26: mod_base = OTHER; note = 2'-O-methyl modified nucleotide
  modified_base 27: mod_base = OTHER; note = 2'-O-methyl modified nucleotide
  modified_base 28: mod_base = OTHER; note = 2'-O-methyl modified nucleotide
  modified_base 29: mod_base = OTHER; note = 2'-O-methyl modified nucleotide
  modified_base 30: mod_base = OTHER; note = 2'-O-methyl modified nucleotide
  modified_base 31: mod_base = OTHER; note = 2'-O-methyl modified nucleotide
  modified_base 32: mod_base = OTHER; note = 2'-O-methyl modified nucleotide
  modified_base 33: mod_base = OTHER; note = 2'-O-methyl modified nucleotide
  misc_difference 34: note = 2'-O-methyl modified nucleotide may be trivalent N-acetylgalactosamine modified
nttgatgtagacctccttcgaggtctacatcaaa

SEQ ID NO: 1640 - RNA, 34 nt, synthetic construct
  source 1..34: mol_type = other RNA
  misc_difference 1: note = 2'-O-methyl modified nucleotide may be 5' phosphate modified
  modified_base 2: mod_base = OTHER; note = 2'-fluoro modified nucleotide
  modified_base 3: mod_base = OTHER; note = 2'-O-methyl modified nucleotide
  modified_base 4: mod_base = OTHER; note = 2'-O-methyl modified nucleotide
  modified_base 5: mod_base = OTHER; note = 2'-O-methyl modified nucleotide
  modified_base 6: mod_base = OTHER; note = 2'-O-methyl modified nucleotide
  modified_base 7: mod_base = OTHER; note = 2'-O-methyl modified nucleotide
  modified_base 8: mod_base = OTHER; note = 2'-O-methyl modified nucleotide
  modified_base 9: mod_base = OTHER; note = 2'-O-methyl modified nucleotide
  modified_base 10: mod_base = OTHER; note = 2'-O-methyl modified nucleotide
  modified_base 11: mod_base = OTHER; note = 2'-O-methyl modified nucleotide
  modified_base 12: mod_base = OTHER; note = 2'-O-methyl modified nucleotide
  modified_base 13: mod_base = OTHER; note = 2'-O-methyl modified nucleotide
  modified_base 14: mod_base = OTHER; note = 2'-fluoro modified nucleotide
  modified_base 15: mod_base = OTHER; note = 2'-O-methyl modified nucleotide
  modified_base 16: mod_base = OTHER; note = 2'-O-methyl modified nucleotide
  modified_base 17: mod_base = OTHER; note = 2'-O-methyl modified nucleotide
  modified_base 18: mod_base = OTHER; note = 2'-O-methyl modified nucleotide
  modified_base 19: mod_base = OTHER; note = 2'-O-methyl modified nucleotide
  modified_base 20: mod_base = OTHER; note = 2'-O-methyl modified nucleotide
  modified_base 21: mod_base = OTHER; note = 2'-O-methyl modified nucleotide
  modified_base 22: mod_base = OTHER; note = 2'-fluoro modified nucleotide
  modified_base 23: mod_base = OTHER; note = 2'-fluoro modified nucleotide
  modified_base 24: mod_base = OTHER; note = 2'-fluoro modified nucleotide
  modified_base 25: mod_base = OTHER; note = 2'-O-methyl modified nucleotide
  modified_base 26: mod_base = OTHER; note = 2'-O-methyl modified nucleotide
  modified_base 27: mod_base = OTHER; note = 2'-O-methyl modified nucleotide
  modified_base 28: mod_base = OTHER; note = 2'-O-methyl modified nucleotide
  modified_base 29: mod_base = OTHER; note = 2'-O-methyl modified nucleotide
  modified_base 30: mod_base = OTHER; note = 2'-O-methyl modified nucleotide
  modified_base 31: mod_base = OTHER; note = 2'-O-methyl modified nucleotide
  modified_base 32: mod_base = OTHER; note = 2'-O-methyl modified nucleotide
  modified_base 33: mod_base = OTHER; note = 2'-O-methyl modified nucleotide
  misc_difference 34: note = 2'-O-methyl modified nucleotide may be trivalent N-acetylgalactosamine modified
nggcaagtggtagttggagaactaccacttgcca

SEQ ID NO: 1641 - RNA, 34 nt, synthetic construct
  source 1..34: mol_type = other RNA
  misc_difference 1: note = 2'-O-methyl modified nucleotide may be 5' phosphate modified
  modified_base 2: mod_base = OTHER; note = 2'-fluoro modified nucleotide
  modified_base 3: mod_base = OTHER; note = 2'-O-methyl modified nucleotide
  modified_base 4: mod_base = OTHER; note = 2'-O-methyl modified nucleotide
  modified_base 5: mod_base = OTHER; note = 2'-O-methyl modified nucleotide
  modified_base 6: mod_base = OTHER; note = 2'-O-methyl modified nucleotide
  modified_base 7: mod_base = OTHER; note = 2'-O-methyl modified nucleotide
  modified_base 8: mod_base = OTHER; note = 2'-O-methyl modified nucleotide
  modified_base 9: mod_base = OTHER; note = 2'-O-methyl modified nucleotide
  modified_base 10: mod_base = OTHER; note = 2'-O-methyl modified nucleotide
  modified_base 11: mod_base = OTHER; note = 2'-O-methyl modified nucleotide
  modified_base 12: mod_base = OTHER; note = 2'-O-methyl modified nucleotide
  modified_base 13: mod_base = OTHER; note = 2'-O-methyl modified nucleotide
  modified_base 14: mod_base = OTHER; note = 2'-fluoro modified nucleotide
  modified_base 15: mod_base = OTHER; note = 2'-O-methyl modified nucleotide
  modified_base 16: mod_base = OTHER; note = 2'-O-methyl modified nucleotide
  modified_base 17: mod_base = OTHER; note = 2'-O-methyl modified nucleotide
  modified_base 18: mod_base = OTHER; note = 2'-O-methyl modified nucleotide
  modified_base 19: mod_base = OTHER; note = 2'-O-methyl modified nucleotide
  modified_base 20: mod_base = OTHER; note = 2'-O-methyl modified nucleotide
  modified_base 21: mod_base = OTHER; note = 2'-O-methyl modified nucleotide
  modified_base 22: mod_base = OTHER; note = 2'-fluoro modified nucleotide
  modified_base 23: mod_base = OTHER; note = 2'-fluoro modified nucleotide
  modified_base 24: mod_base = OTHER; note = 2'-fluoro modified nucleotide
  modified_base 25: mod_base = OTHER; note = 2'-O-methyl modified nucleotide
  modified_base 26: mod_base = OTHER; note = 2'-O-methyl modified nucleotide
  modified_base 27: mod_base = OTHER; note = 2'-O-methyl modified nucleotide
  modified_base 28: mod_base = OTHER; note = 2'-O-methyl modified nucleotide
  modified_base 29: mod_base = OTHER; note = 2'-O-methyl modified nucleotide
  modified_base 30: mod_base = OTHER; note = 2'-O-methyl modified nucleotide
  modified_base 31: mod_base = OTHER; note = 2'-O-methyl modified nucleotide
  modified_base 32: mod_base = OTHER; note = 2'-O-methyl modified nucleotide
  modified_base 33: mod_base = OTHER; note = 2'-O-methyl modified nucleotide
  misc_difference 34: note = 2'-O-methyl modified nucleotide may be trivalent N-acetylgalactosamine modified
nggaagcctcaaagctcgagctttgaggcttcca

SEQ ID NO: 1642 - RNA, 34 nt, synthetic construct
  source 1..34: mol_type = other RNA
  misc_difference 1: note = 2'-O-methyl modified nucleotide may be 5' phosphate modified
  modified_base 2: mod_base = OTHER; note = 2'-fluoro modified nucleotide
  modified_base 3: mod_base = OTHER; note = 2'-O-methyl modified nucleotide
  modified_base 4: mod_base = OTHER; note = 2'-O-methyl modified nucleotide
  modified_base 5: mod_base = OTHER; note = 2'-O-methyl modified nucleotide
  modified_base 6: mod_base = OTHER; note = 2'-O-methyl modified nucleotide
  modified_base 7: mod_base = OTHER; note = 2'-O-methyl modified nucleotide
  modified_base 8: mod_base = OTHER; note = 2'-O-methyl modified nucleotide
  modified_base 9: mod_base = OTHER; note = 2'-O-methyl modified nucleotide
  modified_base 10: mod_base = OTHER; note = 2'-O-methyl modified nucleotide
  modified_base 11: mod_base = OTHER; note = 2'-O-methyl modified nucleotide
  modified_base 12: mod_base = OTHER; note = 2'-O-methyl modified nucleotide
  modified_base 13: mod_base = OTHER; note = 2'-O-methyl modified nucleotide
  modified_base 14: mod_base = OTHER; note = 2'-fluoro modified nucleotide
  modified_base 15: mod_base = OTHER; note = 2'-O-methyl modified nucleotide
  modified_base 16: mod_base = OTHER; note = 2'-O-methyl modified nucleotide
  modified_base 17: mod_base = OTHER; note = 2'-O-methyl modified nucleotide
  modified_base 18: mod_base = OTHER; note = 2'-O-methyl modified nucleotide
  modified_base 19: mod_base = OTHER; note = 2'-O-methyl modified nucleotide
  modified_base 20: mod_base = OTHER; note = 2'-O-methyl modified nucleotide
  modified_base 21: mod_base = OTHER; note = 2'-O-methyl modified nucleotide
  modified_base 22: mod_base = OTHER; note = 2'-fluoro modified nucleotide
  modified_base 23: mod_base = OTHER; note = 2'-fluoro modified nucleotide
  modified_base 24: mod_base = OTHER; note = 2'-fluoro modified nucleotide
  modified_base 25: mod_base = OTHER; note = 2'-O-methyl modified nucleotide
  modified_base 26: mod_base = OTHER; note = 2'-O-methyl modified nucleotide
  modified_base 27: mod_base = OTHER; note = 2'-O-methyl modified nucleotide
  modified_base 28: mod_base = OTHER; note = 2'-O-methyl modified nucleotide
  modified_base 29: mod_base = OTHER; note = 2'-O-methyl modified nucleotide
  modified_base 30: mod_base = OTHER; note = 2'-O-methyl modified nucleotide
  modified_base 31: mod_base = OTHER; note = 2'-O-methyl modified nucleotide
  modified_base 32: mod_base = OTHER; note = 2'-O-methyl modified nucleotide
  modified_base 33: mod_base = OTHER; note = 2'-O-methyl modified nucleotide
  misc_difference 34: note = 2'-O-methyl modified nucleotide may be trivalent N-acetylgalactosamine modified
naatgacagtaattgggtccaattactgtcatta

SEQ ID NO: 1643 - RNA, 34 nt, synthetic construct
  source 1..34: mol_type = other RNA
  misc_difference 1: note = 2'-O-methyl modified nucleotide may be 5' phosphate modified
  modified_base 2: mod_base = OTHER; note = 2'-fluoro modified nucleotide
  modified_base 3: mod_base = OTHER; note = 2'-O-methyl modified nucleotide
  modified_base 4: mod_base = OTHER; note = 2'-O-methyl modified nucleotide
  modified_base 5: mod_base = OTHER; note = 2'-O-methyl modified nucleotide
  modified_base 6: mod_base = OTHER; note = 2'-O-methyl modified nucleotide
  modified_base 7: mod_base = OTHER; note = 2'-O-methyl modified nucleotide
  modified_base 8: mod_base = OTHER; note = 2'-O-methyl modified nucleotide
  modified_base 9: mod_base = OTHER; note = 2'-O-methyl modified nucleotide
  modified_base 10: mod_base = OTHER; note = 2'-O-methyl modified nucleotide
  modified_base 11: mod_base = OTHER; note = 2'-O-methyl modified nucleotide
  modified_base 12: mod_base = OTHER; note = 2'-O-methyl modified nucleotide
  modified_base 13: mod_base = OTHER; note = 2'-O-methyl modified nucleotide
  modified_base 14: mod_base = OTHER; note = 2'-fluoro modified nucleotide
  modified_base 15: mod_base = OTHER; note = 2'-O-methyl modified nucleotide
  modified_base 16: mod_base = OTHER; note = 2'-O-methyl modified nucleotide
  modified_base 17: mod_base = OTHER; note = 2'-O-methyl modified nucleotide
  modified_base 18: mod_base = OTHER; note = 2'-O-methyl modified nucleotide
  modified_base 19: mod_base = OTHER; note = 2'-O-methyl modified nucleotide
  modified_base 20: mod_base = OTHER; note = 2'-O-methyl modified nucleotide
  modified_base 21: mod_base = OTHER; note = 2'-O-methyl modified nucleotide
  modified_base 22: mod_base = OTHER; note = 2'-fluoro modified nucleotide
  modified_base 23: mod_base = OTHER; note = 2'-fluoro modified nucleotide
  modified_base 24: mod_base = OTHER; note = 2'-fluoro modified nucleotide
  modified_base 25: mod_base = OTHER; note = 2'-O-methyl modified nucleotide
  modified_base 26: mod_base = OTHER; note = 2'-O-methyl modified nucleotide
  modified_base 27: mod_base = OTHER; note = 2'-O-methyl modified nucleotide
  modified_base 28: mod_base = OTHER; note = 2'-O-methyl modified nucleotide
  modified_base 29: mod_base = OTHER; note = 2'-O-methyl modified nucleotide
  modified_base 30: mod_base = OTHER; note = 2'-O-methyl modified nucleotide
  modified_base 31: mod_base = OTHER; note = 2'-O-methyl modified nucleotide
  modified_base 32: mod_base = OTHER; note = 2'-O-methyl modified nucleotide
  modified_base 33: mod_base = OTHER; note = 2'-O-methyl modified nucleotide
  misc_difference 34: note = 2'-O-methyl modified nucleotide may be trivalent N-acetylgalactosamine modified
ntttgaacacatgttgctcaacatgtgttcaaaa

SEQ ID NO: 1644 - RNA, 34 nt, synthetic construct
  source 1..34: mol_type = other RNA
  misc_difference 1: note = 2'-O-methyl modified nucleotide may be 5' phosphate modified
  modified_base 2: mod_base = OTHER; note = 2'-fluoro modified nucleotide
  modified_base 3: mod_base = OTHER; note = 2'-O-methyl modified nucleotide
  modified_base 4: mod_base = OTHER; note = 2'-O-methyl modified nucleotide
  modified_base 5: mod_base = OTHER; note = 2'-O-methyl modified nucleotide
  modified_base 6: mod_base = OTHER; note = 2'-O-methyl modified nucleotide
  modified_base 7: mod_base = OTHER; note = 2'-O-methyl modified nucleotide
  modified_base 8: mod_base = OTHER; note = 2'-O-methyl modified nucleotide
  modified_base 9: mod_base = OTHER; note = 2'-O-methyl modified nucleotide
  modified_base 10: mod_base = OTHER; note = 2'-O-methyl modified nucleotide
  modified_base 11: mod_base = OTHER; note = 2'-O-methyl modified nucleotide
  modified_base 12: mod_base = OTHER; note = 2'-O-methyl modified nucleotide
  modified_base 13: mod_base = OTHER; note = 2'-O-methyl modified nucleotide
  modified_base 14: mod_base = OTHER; note = 2'-fluoro modified nucleotide
  modified_base 15: mod_base = OTHER; note = 2'-O-methyl modified nucleotide
  modified_base 16: mod_base = OTHER; note = 2'-O-methyl modified nucleotide
  modified_base 17: mod_base = OTHER; note = 2'-O-methyl modified nucleotide
  modified_base 18: mod_base = OTHER; note = 2'-O-methyl modified nucleotide
  modified_base 19: mod_base = OTHER; note = 2'-O-methyl modified nucleotide
  modified_base 20: mod_base = OTHER; note = 2'-O-methyl modified nucleotide
  modified_base 21: mod_base = OTHER; note = 2'-O-methyl modified nucleotide
  modified_base 22: mod_base = OTHER; note = 2'-fluoro modified nucleotide
  modified_base 23: mod_base = OTHER; note = 2'-fluoro modified nucleotide
  modified_base 24: mod_base = OTHER; note = 2'-fluoro modified nucleotide
  modified_base 25: mod_base = OTHER; note = 2'-O-methyl modified nucleotide
  modified_base 26: mod_base = OTHER; note = 2'-O-methyl modified nucleotide
  modified_base 27: mod_base = OTHER; note = 2'-O-methyl modified nucleotide
  modified_base 28: mod_base = OTHER; note = 2'-O-methyl modified nucleotide
  modified_base 29: mod_base = OTHER; note = 2'-O-methyl modified nucleotide
  modified_base 30: mod_base = OTHER; note = 2'-O-methyl modified nucleotide
  modified_base 31: mod_base = OTHER; note = 2'-O-methyl modified nucleotide
  modified_base 32: mod_base = OTHER; note = 2'-O-methyl modified nucleotide
  modified_base 33: mod_base = OTHER; note = 2'-O-methyl modified nucleotide
  misc_difference 34: note = 2'-O-methyl modified nucleotide may be trivalent N-acetylgalactosamine modified
naaatcctcatcttggagtcaagatgaggattta

SEQ ID NO: 1645 - RNA, 34 nt, synthetic construct
  source 1..34: mol_type = other RNA
  misc_difference 1: note = 2'-O-methyl modified nucleotide may be 5' phosphate modified
  modified_base 2: mod_base = OTHER; note = 2'-fluoro modified nucleotide
  modified_base 3: mod_base = OTHER; note = 2'-O-methyl modified nucleotide
  modified_base 4: mod_base = OTHER; note = 2'-O-methyl modified nucleotide
  modified_base 5: mod_base = OTHER; note = 2'-O-methyl modified nucleotide
  modified_base 6: mod_base = OTHER; note = 2'-O-methyl modified nucleotide
  modified_base 7: mod_base = OTHER; note = 2'-O-methyl modified nucleotide
  modified_base 8: mod_base = OTHER; note = 2'-O-methyl modified nucleotide
  modified_base 9: mod_base = OTHER; note = 2'-O-methyl modified nucleotide
  modified_base 10: mod_base = OTHER; note = 2'-O-methyl modified nucleotide
  modified_base 11: mod_base = OTHER; note = 2'-O-methyl modified nucleotide
  modified_base 12: mod_base = OTHER; note = 2'-O-methyl modified nucleotide
  modified_base 13: mod_base = OTHER; note = 2'-O-methyl modified nucleotide
  modified_base 14: mod_base = OTHER; note = 2'-fluoro modified nucleotide
  modified_base 15: mod_base = OTHER; note = 2'-O-methyl modified nucleotide
  modified_base 16: mod_base = OTHER; note = 2'-O-methyl modified nucleotide
  modified_base 17: mod_base = OTHER; note = 2'-O-methyl modified nucleotide
  modified_base 18: mod_base = OTHER; note = 2'-O-methyl modified nucleotide
  modified_base 19: mod_base = OTHER; note = 2'-O-methyl modified nucleotide
  modified_base 20: mod_base = OTHER; note = 2'-O-methyl modified nucleotide
  modified_base 21: mod_base = OTHER; note = 2'-O-methyl modified nucleotide
  modified_base 22: mod_base = OTHER; note = 2'-fluoro modified nucleotide
  modified_base 23: mod_base = OTHER; note = 2'-fluoro modified nucleotide
  modified_base 24: mod_base = OTHER; note = 2'-fluoro modified nucleotide
  modified_base 25: mod_base = OTHER; note = 2'-O-methyl modified nucleotide
  modified_base 26: mod_base = OTHER; note = 2'-O-methyl modified nucleotide
  modified_base 27: mod_base = OTHER; note = 2'-O-methyl modified nucleotide
  modified_base 28: mod_base = OTHER; note = 2'-O-methyl modified nucleotide
  modified_base 29: mod_base = OTHER; note = 2'-O-methyl modified nucleotide
  modified_base 30: mod_base = OTHER; note = 2'-O-methyl modified nucleotide
  modified_base 31: mod_base = OTHER; note = 2'-O-methyl modified nucleotide
  modified_base 32: mod_base = OTHER; note = 2'-O-methyl modified nucleotide
  modified_base 33: mod_base = OTHER; note = 2'-O-methyl modified nucleotide
  misc_difference 34: note = 2'-O-methyl modified nucleotide may be trivalent N-acetylgalactosamine modified
nggagtttctccttcagccgaaggagaaactcca

SEQ ID NO: 1646 - RNA, 34 nt, synthetic construct
  source 1..34: mol_type = other RNA
  misc_difference 1: note = 2'-O-methyl modified nucleotide may be 5' phosphate modified
  modified_base 2: mod_base = OTHER; note = 2'-fluoro modified nucleotide
  modified_base 3: mod_base = OTHER; note = 2'-O-methyl modified nucleotide
  modified_base 4: mod_base = OTHER; note = 2'-O-methyl modified nucleotide
  modified_base 5: mod_base = OTHER; note = 2'-O-methyl modified nucleotide
  modified_base 6: mod_base = OTHER; note = 2'-O-methyl modified nucleotide
  modified_base 7: mod_base = OTHER; note = 2'-O-methyl modified nucleotide
  modified_base 8: mod_base = OTHER; note = 2'-O-methyl modified nucleotide
  modified_base 9: mod_base = OTHER; note = 2'-O-methyl modified nucleotide
  modified_base 10: mod_base = OTHER; note = 2'-O-methyl modified nucleotide
  modified_base 11: mod_base = OTHER; note = 2'-O-methyl modified nucleotide
  modified_base 12: mod_base = OTHER; note = 2'-O-methyl modified nucleotide
  modified_base 13: mod_base = OTHER; note = 2'-O-methyl modified nucleotide
  modified_base 14: mod_base = OTHER; note = 2'-fluoro modified nucleotide
  modified_base 15: mod_base = OTHER; note = 2'-O-methyl modified nucleotide
  modified_base 16: mod_base = OTHER; note = 2'-O-methyl modified nucleotide
  modified_base 17: mod_base = OTHER; note = 2'-O-methyl modified nucleotide
  modified_base 18: mod_base = OTHER; note = 2'-O-methyl modified nucleotide
  modified_base 19: mod_base = OTHER; note = 2'-O-methyl modified nucleotide
  modified_base 20: mod_base = OTHER; note = 2'-O-methyl modified nucleotide
  modified_base 21: mod_base = OTHER; note = 2'-O-methyl modified nucleotide
  modified_base 22: mod_base = OTHER; note = 2'-fluoro modified nucleotide
  modified_base 23: mod_base = OTHER; note = 2'-fluoro modified nucleotide
  modified_base 24: mod_base = OTHER; note = 2'-fluoro modified nucleotide
  modified_base 25: mod_base = OTHER; note = 2'-O-methyl modified nucleotide
  modified_base 26: mod_base = OTHER; note = 2'-O-methyl modified nucleotide
  modified_base 27: mod_base = OTHER; note = 2'-O-methyl modified nucleotide
  modified_base 28: mod_base = OTHER; note = 2'-O-methyl modified nucleotide
  modified_base 29: mod_base = OTHER; note = 2'-O-methyl modified nucleotide
  modified_base 30: mod_base = OTHER; note = 2'-O-methyl modified nucleotide
  modified_base 31: mod_base = OTHER; note = 2'-O-methyl modified nucleotide
  modified_base 32: mod_base = OTHER; note = 2'-O-methyl modified nucleotide
  modified_base 33: mod_base = OTHER; note = 2'-O-methyl modified nucleotide
  misc_difference 34: note = 2'-O-methyl modified nucleotide may be trivalent N-acetylgalactosamine modified
ncataacttgccaccttctggtggcaagttatga

SEQ ID NO: 1647 - RNA, 34 nt, synthetic construct
  source 1..34: mol_type = other RNA
  misc_difference 1: note = 2'-O-methyl modified nucleotide may be 5' phosphate modified
  modified_base 2: mod_base = OTHER; note = 2'-fluoro modified nucleotide
  modified_base 3: mod_base = OTHER; note = 2'-O-methyl modified nucleotide
  modified_base 4: mod_base = OTHER; note = 2'-O-methyl modified nucleotide
  modified_base 5: mod_base = OTHER; note = 2'-O-methyl modified nucleotide
  modified_base 6: mod_base = OTHER; note = 2'-O-methyl modified nucleotide
  modified_base 7: mod_base = OTHER; note = 2'-O-methyl modified nucleotide
  modified_base 8: mod_base = OTHER; note = 2'-O-methyl modified nucleotide
  modified_base 9: mod_base = OTHER; note = 2'-O-methyl modified nucleotide
  modified_base 10: mod_base = OTHER; note = 2'-O-methyl modified nucleotide
  modified_base 11: mod_base = OTHER; note = 2'-O-methyl modified nucleotide
  modified_base 12: mod_base = OTHER; note = 2'-O-methyl modified nucleotide
  modified_base 13: mod_base = OTHER; note = 2'-O-methyl modified nucleotide
  modified_base 14: mod_base = OTHER; note = 2'-fluoro modified nucleotide
  modified_base 15: mod_base = OTHER; note = 2'-O-methyl modified nucleotide
  modified_base 16: mod_base = OTHER; note = 2'-O-methyl modified nucleotide
  modified_base 17: mod_base = OTHER; note = 2'-O-methyl modified nucleotide
  modified_base 18: mod_base = OTHER; note = 2'-O-methyl modified nucleotide
  modified_base 19: mod_base = OTHER; note = 2'-O-methyl modified nucleotide
  modified_base 20: mod_base = OTHER; note = 2'-O-methyl modified nucleotide
  modified_base 21: mod_base = OTHER; note = 2'-O-methyl modified nucleotide
  modified_base 22: mod_base = OTHER; note = 2'-fluoro modified nucleotide
  modified_base 23: mod_base = OTHER; note = 2'-fluoro modified nucleotide
  modified_base 24: mod_base = OTHER; note = 2'-fluoro modified nucleotide
  modified_base 25: mod_base = OTHER; note = 2'-O-methyl modified nucleotide
  modified_base 26: mod_base = OTHER; note = 2'-O-methyl modified nucleotide
  modified_base 27: mod_base = OTHER; note = 2'-O-methyl modified nucleotide
  modified_base 28: mod_base = OTHER; note = 2'-O-methyl modified nucleotide
  modified_base 29: mod_base = OTHER; note = 2'-O-methyl modified nucleotide
  modified_base 30: mod_base = OTHER; note = 2'-O-methyl modified nucleotide
  modified_base 31: mod_base = OTHER; note = 2'-O-methyl modified nucleotide
  modified_base 32: mod_base = OTHER; note = 2'-O-methyl modified nucleotide
  modified_base 33: mod_base = OTHER; note = 2'-O-methyl modified nucleotide
  misc_difference 34: note = 2'-O-methyl modified nucleotide may be trivalent N-acetylgalactosamine modified
ngctgttttaattcaatcctgaattaaaacagca

SEQ ID NO: 1648 - RNA, 34 nt, synthetic construct
  source 1..34: mol_type = other RNA
  misc_difference 1: note = 2'-O-methyl modified nucleotide may be 5' phosphate modified
  modified_base 2: mod_base = OTHER; note = 2'-fluoro modified nucleotide
  modified_base 3: mod_base = OTHER; note = 2'-O-methyl modified nucleotide
  modified_base 4: mod_base = OTHER; note = 2'-O-methyl modified nucleotide
  modified_base 5: mod_base = OTHER; note = 2'-O-methyl modified nucleotide
  modified_base 6: mod_base = OTHER; note = 2'-O-methyl modified nucleotide
  modified_base 7: mod_base = OTHER; note = 2'-O-methyl modified nucleotide
  modified_base 8: mod_base = OTHER; note = 2'-O-methyl modified nucleotide
  modified_base 9: mod_base = OTHER; note = 2'-O-methyl modified nucleotide
  modified_base 10: mod_base = OTHER; note = 2'-O-methyl modified nucleotide
  modified_base 11: mod_base = OTHER; note = 2'-O-methyl modified nucleotide
  modified_base 12: mod_base = OTHER; note = 2'-O-methyl modified nucleotide
  modified_base 13: mod_base = OTHER; note = 2'-O-methyl modified nucleotide
  modified_base 14: mod_base = OTHER; note = 2'-fluoro modified nucleotide
  modified_base 15: mod_base = OTHER; note = 2'-O-methyl modified nucleotide
  modified_base 16: mod_base = OTHER; note = 2'-O-methyl modified nucleotide
  modified_base 17: mod_base = OTHER; note = 2'-O-methyl modified nucleotide
  modified_base 18: mod_base = OTHER; note = 2'-O-methyl modified nucleotide
  modified_base 19: mod_base = OTHER; note = 2'-O-methyl modified nucleotide
  modified_base 20: mod_base = OTHER; note = 2'-O-methyl modified nucleotide
  modified_base 21: mod_base = OTHER; note = 2'-O-methyl modified nucleotide
  modified_base 22: mod_base = OTHER; note = 2'-fluoro modified nucleotide
  modified_base 23: mod_base = OTHER; note = 2'-fluoro modified nucleotide
  modified_base 24: mod_base = OTHER; note = 2'-fluoro modified nucleotide
  modified_base 25: mod_base = OTHER; note = 2'-O-methyl modified nucleotide
  modified_base 26: mod_base = OTHER; note = 2'-O-methyl modified nucleotide
  modified_base 27: mod_base = OTHER; note = 2'-O-methyl modified nucleotide
  modified_base 28: mod_base = OTHER; note = 2'-O-methyl modified nucleotide
  modified_base 29: mod_base = OTHER; note = 2'-O-methyl modified nucleotide
  modified_base 30: mod_base = OTHER; note = 2'-O-methyl modified nucleotide
  modified_base 31: mod_base = OTHER; note = 2'-O-methyl modified nucleotide
  modified_base 32: mod_base = OTHER; note = 2'-O-methyl modified nucleotide
  modified_base 33: mod_base = OTHER; note = 2'-O-methyl modified nucleotide
  misc_difference 34: note = 2'-O-methyl modified nucleotide may be trivalent N-acetylgalactosamine modified
naagctcgagttgttccctaacaactcgagctta

SEQ ID NO: 1649 - RNA, 34 nt, synthetic construct
  source 1..34: mol_type = other RNA
  misc_difference 1: note = 2'-O-methyl modified nucleotide may be 5' phosphate modified
  modified_base 2: mod_base = OTHER; note = 2'-fluoro modified nucleotide
  modified_base 3: mod_base = OTHER; note = 2'-O-methyl modified nucleotide
  modified_base 4: mod_base = OTHER; note = 2'-O-methyl modified nucleotide
  modified_base 5: mod_base = OTHER; note = 2'-O-methyl modified nucleotide
  modified_base 6: mod_base = OTHER; note = 2'-O-methyl modified nucleotide
  modified_base 7: mod_base = OTHER; note = 2'-O-methyl modified nucleotide
  modified_base 8: mod_base = OTHER; note = 2'-O-methyl modified nucleotide
  modified_base 9: mod_base = OTHER; note = 2'-O-methyl modified nucleotide
  modified_base 10: mod_base = OTHER; note = 2'-O-methyl modified nucleotide
  modified_base 11: mod_base = OTHER; note = 2'-O-methyl modified nucleotide
  modified_base 12: mod_base = OTHER; note = 2'-O-methyl modified nucleotide
  modified_base 13: mod_base = OTHER; note = 2'-O-methyl modified nucleotide
  modified_base 14: mod_base = OTHER; note = 2'-fluoro modified nucleotide
  modified_base 15: mod_base = OTHER; note = 2'-O-methyl modified nucleotide
  modified_base 16: mod_base = OTHER; note = 2'-O-methyl modified nucleotide
  modified_base 17: mod_base = OTHER; note = 2'-O-methyl modified nucleotide
  modified_base 18: mod_base = OTHER; note = 2'-O-methyl modified nucleotide
  modified_base 19: mod_base = OTHER; note = 2'-O-methyl modified nucleotide
  modified_base 20: mod_base = OTHER; note = 2'-O-methyl modified nucleotide
  modified_base 21: mod_base = OTHER; note = 2'-O-methyl modified nucleotide
  modified_base 22: mod_base = OTHER; note = 2'-fluoro modified nucleotide
  modified_base 23: mod_base = OTHER; note = 2'-fluoro modified nucleotide
  modified_base 24: mod_base = OTHER; note = 2'-fluoro modified nucleotide
  modified_base 25: mod_base = OTHER; note = 2'-O-methyl modified nucleotide
  modified_base 26: mod_base = OTHER; note = 2'-O-methyl modified nucleotide
  modified_base 27: mod_base = OTHER; note = 2'-O-methyl modified nucleotide
  modified_base 28: mod_base = OTHER; note = 2'-O-methyl modified nucleotide
  modified_base 29: mod_base = OTHER; note = 2'-O-methyl modified nucleotide
  modified_base 30: mod_base = OTHER; note = 2'-O-methyl modified nucleotide
  modified_base 31: mod_base = OTHER; note = 2'-O-methyl modified nucleotide
  modified_base 32: mod_base = OTHER; note = 2'-O-methyl modified nucleotide
  modified_base 33: mod_base = OTHER; note = 2'-O-methyl modified nucleotide
  misc_difference 34: note = 2'-O-methyl modified nucleotide may be trivalent N-acetylgalactosamine modified
nggcaacgtcatagtcataactatgacgttgcca

SEQ ID NO: 1650 - RNA, 34 nt, synthetic construct
  source 1..34: mol_type = other RNA
  misc_difference 1: note = 2'-O-methyl modified nucleotide may be 5' phosphate modified
  modified_base 2: mod_base = OTHER; note = 2'-fluoro modified nucleotide
  modified_base 3: mod_base = OTHER; note = 2'-O-methyl modified nucleotide
  modified_base 4: mod_base = OTHER; note = 2'-O-methyl modified nucleotide
  modified_base 5: mod_base = OTHER; note = 2'-O-methyl modified nucleotide
  modified_base 6: mod_base = OTHER; note = 2'-O-methyl modified nucleotide
  modified_base 7: mod_base = OTHER; note = 2'-O-methyl modified nucleotide
  modified_base 8: mod_base = OTHER; note = 2'-O-methyl modified nucleotide
  modified_base 9: mod_base = OTHER; note = 2'-O-methyl modified nucleotide
  modified_base 10: mod_base = OTHER; note = 2'-O-methyl modified nucleotide
  modified_base 11: mod_base = OTHER; note = 2'-O-methyl modified nucleotide
  modified_base 12: mod_base = OTHER; note = 2'-O-methyl modified nucleotide
  modified_base 13: mod_base = OTHER; note = 2'-O-methyl modified nucleotide
  modified_base 14: mod_base = OTHER; note = 2'-fluoro modified nucleotide
  modified_base 15: mod_base = OTHER; note = 2'-O-methyl modified nucleotide
  modified_base 16: mod_base = OTHER; note = 2'-O-methyl modified nucleotide
  modified_base 17: mod_base = OTHER; note = 2'-O-methyl modified nucleotide
  modified_base 18: mod_base = OTHER; note = 2'-O-methyl modified nucleotide
  modified_base 19: mod_base = OTHER; note = 2'-O-methyl modified nucleotide
  modified_base 20: mod_base = OTHER; note = 2'-O-methyl modified nucleotide
  modified_base 21: mod_base = OTHER; note = 2'-O-methyl modified nucleotide
  modified_base 22: mod_base = OTHER; note = 2'-fluoro modified nucleotide
  modified_base 23: mod_base = OTHER; note = 2'-fluoro modified nucleotide
  modified_base 24: mod_base = OTHER; note = 2'-fluoro modified nucleotide
  modified_base 25: mod_base = OTHER; note = 2'-O-methyl modified nucleotide
  modified_base 26: mod_base = OTHER; note = 2'-O-methyl modified nucleotide
  modified_base 27: mod_base = OTHER; note = 2'-O-methyl modified nucleotide
  modified_base 28: mod_base = OTHER; note = 2'-O-methyl modified nucleotide
  modified_base 29: mod_base = OTHER; note = 2'-O-methyl modified nucleotide
  modified_base 30: mod_base = OTHER; note = 2'-O-methyl modified nucleotide
  modified_base 31: mod_base = OTHER; note = 2'-O-methyl modified nucleotide
  modified_base 32: mod_base = OTHER; note = 2'-O-methyl modified nucleotide
  modified_base 33: mod_base = OTHER; note = 2'-O-methyl modified nucleotide
  misc_difference 34: note = 2'-O-methyl modified nucleotide may be trivalent N-acetylgalactosamine modified
nttccaggttttccatatctggaaaacctggaaa

SEQ ID NO: 1651 - RNA, 34 nt, synthetic construct
  source 1..34: mol_type = other RNA
  misc_difference 1: note = 2'-O-methyl modified nucleotide may be 5' phosphate modified
  modified_base 2: mod_base = OTHER; note = 2'-fluoro modified nucleotide
  modified_base 3: mod_base = OTHER; note = 2'-O-methyl modified nucleotide
  modified_base 4: mod_base = OTHER; note = 2'-O-methyl modified nucleotide
  modified_base 5: mod_base = OTHER; note = 2'-O-methyl modified nucleotide
  modified_base 6: mod_base = OTHER; note = 2'-O-methyl modified nucleotide
  modified_base 7: mod_base = OTHER; note = 2'-O-methyl modified nucleotide
  modified_base 8: mod_base = OTHER; note = 2'-O-methyl modified nucleotide
  modified_base 9: mod_base = OTHER; note = 2'-O-methyl modified nucleotide
  modified_base 10: mod_base = OTHER; note = 2'-O-methyl modified nucleotide
  modified_base 11: mod_base = OTHER; note = 2'-O-methyl modified nucleotide
  modified_base 12: mod_base = OTHER; note = 2'-O-methyl modified nucleotide
  modified_base 13: mod_base = OTHER; note = 2'-O-methyl modified nucleotide
  modified_base 14: mod_base = OTHER; note = 2'-fluoro modified nucleotide
  modified_base 15: mod_base = OTHER; note = 2'-O-methyl modified nucleotide
  modified_base 16: mod_base = OTHER; note = 2'-O-methyl modified nucleotide
  modified_base 17: mod_base = OTHER; note = 2'-O-methyl modified nucleotide
  modified_base 18: mod_base = OTHER; note = 2'-O-methyl modified nucleotide
  modified_base 19: mod_base = OTHER; note = 2'-O-methyl modified nucleotide
  modified_base 20: mod_base = OTHER; note = 2'-O-methyl modified nucleotide
  modified_base 21: mod_base = OTHER; note = 2'-O-methyl modified nucleotide
  modified_base 22: mod_base = OTHER; note = 2'-fluoro modified nucleotide
  modified_base 23: mod_base = OTHER; note = 2'-fluoro modified nucleotide
  modified_base 24: mod_base = OTHER; note = 2'-fluoro modified nucleotide
  modified_base 25: mod_base = OTHER; note = 2'-O-methyl modified nucleotide
  modified_base 26: mod_base = OTHER; note = 2'-O-methyl modified nucleotide
  modified_base 27: mod_base = OTHER; note = 2'-O-methyl modified nucleotide
  modified_base 28: mod_base = OTHER; note = 2'-O-methyl modified nucleotide
  modified_base 29: mod_base = OTHER; note = 2'-O-methyl modified nucleotide
  modified_base 30: mod_base = OTHER; note = 2'-O-methyl modified nucleotide
  modified_base 31: mod_base = OTHER; note = 2'-O-methyl modified nucleotide
  modified_base 32: mod_base = OTHER; note = 2'-O-methyl modified nucleotide
  modified_base 33: mod_base = OTHER; note = 2'-O-methyl modified nucleotide
  misc_difference 34: note = 2'-O-methyl modified nucleotide may be trivalent N-acetylgalactosamine modified
ntccaggttttccatatccatggaaaacctggaa

SEQ ID NO: 1652 - RNA, 34 nt, synthetic construct
  source 1..34: mol_type = other RNA
  misc_difference 1: note = 2'-O-methyl modified nucleotide may be 5' phosphate modified
  modified_base 2: mod_base = OTHER; note = 2'-fluoro modified nucleotide
  modified_base 3: mod_base = OTHER; note = 2'-O-methyl modified nucleotide
  modified_base 4: mod_base = OTHER; note = 2'-O-methyl modified nucleotide
  modified_base 5: mod_base = OTHER; note = 2'-O-methyl modified nucleotide
  modified_base 6: mod_base = OTHER; note = 2'-O-methyl modified nucleotide
  modified_base 7: mod_base = OTHER; note = 2'-O-methyl modified nucleotide
  modified_base 8: mod_base = OTHER; note = 2'-O-methyl modified nucleotide
  modified_base 9: mod_base = OTHER; note = 2'-O-methyl modified nucleotide
  modified_base 10: mod_base = OTHER; note = 2'-O-methyl modified nucleotide
  modified_base 11: mod_base = OTHER; note = 2'-O-methyl modified nucleotide
  modified_base 12: mod_base = OTHER; note = 2'-O-methyl modified nucleotide
  modified_base 13: mod_base = OTHER; note = 2'-O-methyl modified nucleotide
  modified_base 14: mod_base = OTHER; note = 2'-fluoro modified nucleotide
  modified_base 15: mod_base = OTHER; note = 2'-O-methyl modified nucleotide
  modified_base 16: mod_base = OTHER; note = 2'-O-methyl modified nucleotide
  modified_base 17: mod_base = OTHER; note = 2'-O-methyl modified nucleotide
  modified_base 18: mod_base = OTHER; note = 2'-O-methyl modified nucleotide
  modified_base 19: mod_base = OTHER; note = 2'-O-methyl modified nucleotide
  modified_base 20: mod_base = OTHER; note = 2'-O-methyl modified nucleotide
  modified_base 21: mod_base = OTHER; note = 2'-O-methyl modified nucleotide
  modified_base 22: mod_base = OTHER; note = 2'-fluoro modified nucleotide
  modified_base 23: mod_base = OTHER; note = 2'-fluoro modified nucleotide
  modified_base 24: mod_base = OTHER; note = 2'-fluoro modified nucleotide
  modified_base 25: mod_base = OTHER; note = 2'-O-methyl modified nucleotide
  modified_base 26: mod_base = OTHER; note = 2'-O-methyl modified nucleotide
  modified_base 27: mod_base = OTHER; note = 2'-O-methyl modified nucleotide
  modified_base 28: mod_base = OTHER; note = 2'-O-methyl modified nucleotide
  modified_base 29: mod_base = OTHER; note = 2'-O-methyl modified nucleotide
  modified_base 30: mod_base = OTHER; note = 2'-O-methyl modified nucleotide
  modified_base 31: mod_base = OTHER; note = 2'-O-methyl modified nucleotide
  modified_base 32: mod_base = OTHER; note = 2'-O-methyl modified nucleotide
  modified_base 33: mod_base = OTHER; note = 2'-O-methyl modified nucleotide
  misc_difference 34: note = 2'-O-methyl modified nucleotide may be trivalent N-acetylgalactosamine modified
nccatgttgtgcaatccatattgcacaacatgga

SEQ ID NO: 1653 - RNA, 34 nt, synthetic construct
  source 1..34: mol_type = other RNA
  misc_difference 1: note = 2'-O-methyl modified nucleotide may be 5' phosphate modified
  modified_base 2: mod_base = OTHER; note = 2'-fluoro modified nucleotide
  modified_base 3: mod_base = OTHER; note = 2'-O-methyl modified nucleotide
  modified_base 4: mod_base = OTHER; note = 2'-O-methyl modified nucleotide
  modified_base 5: mod_base = OTHER; note = 2'-O-methyl modified nucleotide
  modified_base 6: mod_base = OTHER; note = 2'-O-methyl modified nucleotide
  modified_base 7: mod_base = OTHER; note = 2'-O-methyl modified nucleotide
  modified_base 8: mod_base = OTHER; note = 2'-O-methyl modified nucleotide
  modified_base 9: mod_base = OTHER; note = 2'-O-methyl modified nucleotide
  modified_base 10: mod_base = OTHER; note = 2'-O-methyl modified nucleotide
  modified_base 11: mod_base = OTHER; note = 2'-O-methyl modified nucleotide
  modified_base 12: mod_base = OTHER; note = 2'-O-methyl modified nucleotide
  modified_base 13: mod_base = OTHER; note = 2'-O-methyl modified nucleotide
  modified_base 14: mod_base = OTHER; note = 2'-fluoro modified nucleotide
  modified_base 15: mod_base = OTHER; note = 2'-O-methyl modified nucleotide
  modified_base 16: mod_base = OTHER; note = 2'-O-methyl modified nucleotide
  modified_base 17: mod_base = OTHER; note = 2'-O-methyl modified nucleotide
  modified_base 18: mod_base = OTHER; note = 2'-O-methyl modified nucleotide
  modified_base 19: mod_base = OTHER; note = 2'-O-methyl modified nucleotide
  modified_base 20: mod_base = OTHER; note = 2'-O-methyl modified nucleotide
  modified_base 21: mod_base = OTHER; note = 2'-O-methyl modified nucleotide
  modified_base 22: mod_base = OTHER; note = 2'-fluoro modified nucleotide
  modified_base 23: mod_base = OTHER; note = 2'-fluoro modified nucleotide
  modified_base 24: mod_base = OTHER; note = 2'-fluoro modified nucleotide
  modified_base 25: mod_base = OTHER; note = 2'-O-methyl modified nucleotide
  modified_base 26: mod_base = OTHER; note = 2'-O-methyl modified nucleotide
  modified_base 27: mod_base = OTHER; note = 2'-O-methyl modified nucleotide
  modified_base 28: mod_base = OTHER; note = 2'-O-methyl modified nucleotide
  modified_base 29: mod_base = OTHER; note = 2'-O-methyl modified nucleotide
  modified_base 30: mod_base = OTHER; note = 2'-O-methyl modified nucleotide
  modified_base 31: mod_base = OTHER; note = 2'-O-methyl modified nucleotide
  modified_base 32: mod_base = OTHER; note = 2'-O-methyl modified nucleotide
  modified_base 33: mod_base = OTHER; note = 2'-O-methyl modified nucleotide
  misc_difference 34: note = 2'-O-methyl modified nucleotide may be trivalent N-acetylgalactosamine modified
ncatatccttgactttgaaaagtcaaggatatga

SEQ ID NO: 1654 - RNA, 34 nt, synthetic construct
  source 1..34: mol_type = other RNA
  misc_difference 1: note = 2'-O-methyl modified nucleotide may be 5' phosphate modified
  modified_base 2: mod_base = OTHER; note = 2'-fluoro modified nucleotide
  modified_base 3: mod_base = OTHER; note = 2'-O-methyl modified nucleotide
  modified_base 4: mod_base = OTHER; note = 2'-O-methyl modified nucleotide
  modified_base 5: mod_base = OTHER; note = 2'-O-methyl modified nucleotide
  modified_base 6: mod_base = OTHER; note = 2'-O-methyl modified nucleotide
  modified_base 7: mod_base = OTHER; note = 2'-O-methyl modified nucleotide
  modified_base 8: mod_base = OTHER; note = 2'-O-methyl modified nucleotide
  modified_base 9: mod_base = OTHER; note = 2'-O-methyl modified nucleotide
  modified_base 10: mod_base = OTHER; note = 2'-O-methyl modified nucleotide
  modified_base 11: mod_base = OTHER; note = 2'-O-methyl modified nucleotide
  modified_base 12: mod_base = OTHER; note = 2'-O-methyl modified nucleotide
  modified_base 13: mod_base = OTHER; note = 2'-O-methyl modified nucleotide
  modified_base 14: mod_base = OTHER; note = 2'-fluoro modified nucleotide
  modified_base 15: mod_base = OTHER; note = 2'-O-methyl modified nucleotide
  modified_base 16: mod_base = OTHER; note = 2'-O-methyl modified nucleotide
  modified_base 17: mod_base = OTHER; note = 2'-O-methyl modified nucleotide
  modified_base 18: mod_base = OTHER; note = 2'-O-methyl modified nucleotide
  modified_base 19: mod_base = OTHER; note = 2'-O-methyl modified nucleotide
  modified_base 20: mod_base = OTHER; note = 2'-O-methyl modified nucleotide
  modified_base 21: mod_base = OTHER; note = 2'-O-methyl modified nucleotide
  modified_base 22: mod_base = OTHER; note = 2'-fluoro modified nucleotide
  modified_base 23: mod_base = OTHER; note = 2'-fluoro modified nucleotide
  modified_base 24: mod_base = OTHER; note = 2'-fluoro modified nucleotide
  modified_base 25: mod_base = OTHER; note = 2'-O-methyl modified nucleotide
  modified_base 26: mod_base = OTHER; note = 2'-O-methyl modified nucleotide
  modified_base 27: mod_base = OTHER; note = 2'-O-methyl modified nucleotide
  modified_base 28: mod_base = OTHER; note = 2'-O-methyl modified nucleotide
  modified_base 29: mod_base = OTHER; note = 2'-O-methyl modified nucleotide
  modified_base 30: mod_base = OTHER; note = 2'-O-methyl modified nucleotide
  modified_base 31: mod_base = OTHER; note = 2'-O-methyl modified nucleotide
  modified_base 32: mod_base = OTHER; note = 2'-O-methyl modified nucleotide
  modified_base 33: mod_base = OTHER; note = 2'-O-methyl modified nucleotide
  misc_difference 34: note = 2'-O-methyl modified nucleotide may be trivalent N-acetylgalactosamine modified
ntgactttgaacacatgtttgtgttcaaagtcaa

SEQ ID NO: 1655 - RNA, 34 nt, synthetic construct
  source 1..34: mol_type = other RNA
  misc_difference 1: note = 2'-O-methyl modified nucleotide may be 5' phosphate modified
  modified_base 2: mod_base = OTHER; note = 2'-fluoro modified nucleotide
  modified_base 3: mod_base = OTHER; note = 2'-O-methyl modified nucleotide
  modified_base 4: mod_base = OTHER; note = 2'-O-methyl modified nucleotide
  modified_base 5: mod_base = OTHER; note = 2'-O-methyl modified nucleotide
  modified_base 6: mod_base = OTHER; note = 2'-O-methyl modified nucleotide
  modified_base 7: mod_base = OTHER; note = 2'-O-methyl modified nucleotide
  modified_base 8: mod_base = OTHER; note = 2'-O-methyl modified nucleotide
  modified_base 9: mod_base = OTHER; note = 2'-O-methyl modified nucleotide
  modified_base 10: mod_base = OTHER; note = 2'-O-methyl modified nucleotide
  modified_base 11: mod_base = OTHER; note = 2'-O-methyl modified nucleotide
  modified_base 12: mod_base = OTHER; note = 2'-O-methyl modified nucleotide
  modified_base 13: mod_base = OTHER; note = 2'-O-methyl modified nucleotide
  modified_base 14: mod_base = OTHER; note = 2'-fluoro modified nucleotide
  modified_base 15: mod_base = OTHER; note = 2'-O-methyl modified nucleotide
  modified_base 16: mod_base = OTHER; note = 2'-O-methyl modified nucleotide
  modified_base 17: mod_base = OTHER; note = 2'-O-methyl modified nucleotide
  modified_base 18: mod_base = OTHER; note = 2'-O-methyl modified nucleotide
  modified_base 19: mod_base = OTHER; note = 2'-O-methyl modified nucleotide
  modified_base 20: mod_base = OTHER; note = 2'-O-methyl modified nucleotide
  modified_base 21: mod_base = OTHER; note = 2'-O-methyl modified nucleotide
  modified_base 22: mod_base = OTHER; note = 2'-fluoro modified nucleotide
  modified_base 23: mod_base = OTHER; note = 2'-fluoro modified nucleotide
  modified_base 24: mod_base = OTHER; note = 2'-fluoro modified nucleotide
  modified_base 25: mod_base = OTHER; note = 2'-O-methyl modified nucleotide
  modified_base 26: mod_base = OTHER; note = 2'-O-methyl modified nucleotide
  modified_base 27: mod_base = OTHER; note = 2'-O-methyl modified nucleotide
  modified_base 28: mod_base = OTHER; note = 2'-O-methyl modified nucleotide
  modified_base 29: mod_base = OTHER; note = 2'-O-methyl modified nucleotide
  modified_base 30: mod_base = OTHER; note = 2'-O-methyl modified nucleotide
  modified_base 31: mod_base = OTHER; note = 2'-O-methyl modified nucleotide
  modified_base 32: mod_base = OTHER; note = 2'-O-methyl modified nucleotide
  modified_base 33: mod_base = OTHER; note = 2'-O-methyl modified nucleotide
  misc_difference 34: note = 2'-O-methyl modified nucleotide may be trivalent N-acetylgalactosamine modified
nctcatcttggagtttctcaactccaagatgaga

SEQ ID NO: 1656 - RNA, 34 nt, synthetic construct
  source 1..34: mol_type = other RNA
  misc_difference 1: note = 2'-O-methyl modified nucleotide may be 5' phosphate modified
  modified_base 2: mod_base = OTHER; note = 2'-fluoro modified nucleotide
  modified_base 3: mod_base = OTHER; note = 2'-O-methyl modified nucleotide
  modified_base 4: mod_base = OTHER; note = 2'-O-methyl modified nucleotide
  modified_base 5: mod_base = OTHER; note = 2'-O-methyl modified nucleotide
  modified_base 6: mod_base = OTHER; note = 2'-O-methyl modified nucleotide
  modified_base 7: mod_base = OTHER; note = 2'-O-methyl modified nucleotide
  modified_base 8: mod_base = OTHER; note = 2'-O-methyl modified nucleotide
  modified_base 9: mod_base = OTHER; note = 2'-O-methyl modified nucleotide
  modified_base 10: mod_base = OTHER; note = 2'-O-methyl modified nucleotide
  modified_base 11: mod_base = OTHER; note = 2'-O-methyl modified nucleotide
  modified_base 12: mod_base = OTHER; note = 2'-O-methyl modified nucleotide
  modified_base 13: mod_base = OTHER; note = 2'-O-methyl modified nucleotide
  modified_base 14: mod_base = OTHER; note = 2'-fluoro modified nucleotide
  modified_base 15: mod_base = OTHER; note = 2'-O-methyl modified nucleotide
  modified_base 16: mod_base = OTHER; note = 2'-O-methyl modified nucleotide
  modified_base 17: mod_base = OTHER; note = 2'-O-methyl modified nucleotide
  modified_base 18: mod_base = OTHER; note = 2'-O-methyl modified nucleotide
  modified_base 19: mod_base = OTHER; note = 2'-O-methyl modified nucleotide
  modified_base 20: mod_base = OTHER; note = 2'-O-methyl modified nucleotide
  modified_base 21: mod_base = OTHER; note = 2'-O-methyl modified nucleotide
  modified_base 22: mod_base = OTHER; note = 2'-fluoro modified nucleotide
  modified_base 23: mod_base = OTHER; note = 2'-fluoro modified nucleotide
  modified_base 24: mod_base = OTHER; note = 2'-fluoro modified nucleotide
  modified_base 25: mod_base = OTHER; note = 2'-O-methyl modified nucleotide
  modified_base 26: mod_base = OTHER; note = 2'-O-methyl modified nucleotide
  modified_base 27: mod_base = OTHER; note = 2'-O-methyl modified nucleotide
  modified_base 28: mod_base = OTHER; note = 2'-O-methyl modified nucleotide
  modified_base 29: mod_base = OTHER; note = 2'-O-methyl modified nucleotide
  modified_base 30: mod_base = OTHER; note = 2'-O-methyl modified nucleotide
  modified_base 31: mod_base = OTHER; note = 2'-O-methyl modified nucleotide
  modified_base 32: mod_base = OTHER; note = 2'-O-methyl modified nucleotide
  modified_base 33: mod_base = OTHER; note = 2'-O-methyl modified nucleotide
  misc_difference 34: note = 2'-O-methyl modified nucleotide may be trivalent N-acetylgalactosamine modified
ncatgttgctcattgtcttcaatgagcaacatga

SEQ ID NO: 1657 - RNA, 34 nt, synthetic construct
  source 1..34: mol_type = other RNA
  misc_difference 1: note = 2'-O-methyl modified nucleotide may be 5' phosphate modified
  modified_base 2: mod_base = OTHER; note = 2'-fluoro modified nucleotide
  modified_base 3: mod_base = OTHER; note = 2'-O-methyl modified nucleotide
  modified_base 4: mod_base = OTHER; note = 2'-O-methyl modified nucleotide
  modified_base 5: mod_base = OTHER; note = 2'-O-methyl modified nucleotide
  modified_base 6: mod_base = OTHER; note = 2'-O-methyl modified nucleotide
  modified_base 7: mod_base = OTHER; note = 2'-O-methyl modified nucleotide
  modified_base 8: mod_base = OTHER; note = 2'-O-methyl modified nucleotide
  modified_base 9: mod_base = OTHER; note = 2'-O-methyl modified nucleotide
  modified_base 10: mod_base = OTHER; note = 2'-O-methyl modified nucleotide
  modified_base 11: mod_base = OTHER; note = 2'-O-methyl modified nucleotide
  modified_base 12: mod_base = OTHER; note = 2'-O-methyl modified nucleotide
  modified_base 13: mod_base = OTHER; note = 2'-O-methyl modified nucleotide
  modified_base 14: mod_base = OTHER; note = 2'-fluoro modified nucleotide
  modified_base 15: mod_base = OTHER; note = 2'-O-methyl modified nucleotide
  modified_base 16: mod_base = OTHER; note = 2'-O-methyl modified nucleotide
  modified_base 17: mod_base = OTHER; note = 2'-O-methyl modified nucleotide
  modified_base 18: mod_base = OTHER; note = 2'-O-methyl modified nucleotide
  modified_base 19: mod_base = OTHER; note = 2'-O-methyl modified nucleotide
  modified_base 20: mod_base = OTHER; note = 2'-O-methyl modified nucleotide
  modified_base 21: mod_base = OTHER; note = 2'-O-methyl modified nucleotide
  modified_base 22: mod_base = OTHER; note = 2'-fluoro modified nucleotide
  modified_base 23: mod_base = OTHER; note = 2'-fluoro modified nucleotide
  modified_base 24: mod_base = OTHER; note = 2'-fluoro modified nucleotide
  modified_base 25: mod_base = OTHER; note = 2'-O-methyl modified nucleotide
  modified_base 26: mod_base = OTHER; note = 2'-O-methyl modified nucleotide
  modified_base 27: mod_base = OTHER; note = 2'-O-methyl modified nucleotide
  modified_base 28: mod_base = OTHER; note = 2'-O-methyl modified nucleotide
  modified_base 29: mod_base = OTHER; note = 2'-O-methyl modified nucleotide
  modified_base 30: mod_base = OTHER; note = 2'-O-methyl modified nucleotide
  modified_base 31: mod_base = OTHER; note = 2'-O-methyl modified nucleotide
  modified_base 32: mod_base = OTHER; note = 2'-O-methyl modified nucleotide
  modified_base 33: mod_base = OTHER; note = 2'-O-methyl modified nucleotide
  misc_difference 34: note = 2'-O-methyl modified nucleotide may be trivalent N-acetylgalactosamine modified
naccaacttgaatgaaacgtcattcaagttggta

SEQ ID NO: 1658 - RNA, 34 nt, synthetic construct
  source 1..34: mol_type = other RNA
  misc_difference 1: note = 2'-O-methyl modified nucleotide may be 5' phosphate modified
  modified_base 2: mod_base = OTHER; note = 2'-fluoro modified nucleotide
  modified_base 3: mod_base = OTHER; note = 2'-O-methyl modified nucleotide
  modified_base 4: mod_base = OTHER; note = 2'-O-methyl modified nucleotide
  modified_base 5: mod_base = OTHER; note = 2'-O-methyl modified nucleotide
  modified_base 6: mod_base = OTHER; note = 2'-O-methyl modified nucleotide
  modified_base 7: mod_base = OTHER; note = 2'-O-methyl modified nucleotide
  modified_base 8: mod_base = OTHER; note = 2'-O-methyl modified nucleotide
  modified_base 9: mod_base = OTHER; note = 2'-O-methyl modified nucleotide
  modified_base 10: mod_base = OTHER; note = 2'-O-methyl modified nucleotide
  modified_base 11: mod_base = OTHER; note = 2'-O-methyl modified nucleotide
  modified_base 12: mod_base = OTHER; note = 2'-O-methyl modified nucleotide
  modified_base 13: mod_base = OTHER; note = 2'-O-methyl modified nucleotide
  modified_base 14: mod_base = OTHER; note = 2'-fluoro modified nucleotide
  modified_base 15: mod_base = OTHER; note = 2'-O-methyl modified nucleotide
  modified_base 16: mod_base = OTHER; note = 2'-O-methyl modified nucleotide
  modified_base 17: mod_base = OTHER; note = 2'-O-methyl modified nucleotide
  modified_base 18: mod_base = OTHER; note = 2'-O-methyl modified nucleotide
  modified_base 19: mod_base = OTHER; note = 2'-O-methyl modified nucleotide
  modified_base 20: mod_base = OTHER; note = 2'-O-methyl modified nucleotide
  modified_base 21: mod_base = OTHER; note = 2'-O-methyl modified nucleotide
  modified_base 22: mod_base = OTHER; note = 2'-fluoro modified nucleotide
  modified_base 23: mod_base = OTHER; note = 2'-fluoro modified nucleotide
  modified_base 24: mod_base = OTHER; note = 2'-fluoro modified nucleotide
  modified_base 25: mod_base = OTHER; note = 2'-O-methyl modified nucleotide
  modified_base 26: mod_base = OTHER; note = 2'-O-methyl modified nucleotide
  modified_base 27: mod_base = OTHER; note = 2'-O-methyl modified nucleotide
  modified_base 28: mod_base = OTHER; note = 2'-O-methyl modified nucleotide
  modified_base 29: mod_base = OTHER; note = 2'-O-methyl modified nucleotide
  modified_base 30: mod_base = OTHER; note = 2'-O-methyl modified nucleotide
  modified_base 31: mod_base = OTHER; note = 2'-O-methyl modified nucleotide
  modified_base 32: mod_base = OTHER; note = 2'-O-methyl modified nucleotide
  modified_base 33: mod_base = OTHER; note = 2'-O-methyl modified nucleotide
  misc_difference 34: note = 2'-O-methyl modified nucleotide may be trivalent N-acetylgalactosamine modified
nacagatcgctgtctgcccagacagcgatctgta

SEQ ID NO: 1659 - RNA, 34 nt, synthetic construct
  source 1..34: mol_type = other RNA
  misc_difference 1: note = 2'-O-methyl modified nucleotide may be 5' phosphate modified
  modified_base 2: mod_base = OTHER; note = 2'-fluoro modified nucleotide
  modified_base 3: mod_base = OTHER; note = 2'-O-methyl modified nucleotide
  modified_base 4: mod_base = OTHER; note = 2'-O-methyl modified nucleotide
  modified_base 5: mod_base = OTHER; note = 2'-O-methyl modified nucleotide
  modified_base 6: mod_base = OTHER; note = 2'-O-methyl modified nucleotide
  modified_base 7: mod_base = OTHER; note = 2'-O-methyl modified nucleotide
  modified_base 8: mod_base = OTHER; note = 2'-O-methyl modified nucleotide
  modified_base 9: mod_base = OTHER; note = 2'-O-methyl modified nucleotide
  modified_base 10: mod_base = OTHER; note = 2'-O-methyl modified nucleotide
  modified_base 11: mod_base = OTHER; note = 2'-O-methyl modified nucleotide
  modified_base 12: mod_base = OTHER; note = 2'-O-methyl modified nucleotide
  modified_base 13: mod_base = OTHER; note = 2'-O-methyl modified nucleotide
  modified_base 14: mod_base = OTHER; note = 2'-fluoro modified nucleotide
  modified_base 15: mod_base = OTHER; note = 2'-O-methyl modified nucleotide
  modified_base 16: mod_base = OTHER; note = 2'-O-methyl modified nucleotide
  modified_base 17: mod_base = OTHER; note = 2'-O-methyl modified nucleotide
  modified_base 18: mod_base = OTHER; note = 2'-O-methyl modified nucleotide
  modified_base 19: mod_base = OTHER; note = 2'-O-methyl modified nucleotide
  modified_base 20: mod_base = OTHER; note = 2'-O-methyl modified nucleotide
  modified_base 21: mod_base = OTHER; note = 2'-O-methyl modified nucleotide
  modified_base 22: mod_base = OTHER; note = 2'-fluoro modified nucleotide
  modified_base 23: mod_base = OTHER; note = 2'-fluoro modified nucleotide
  modified_base 24: mod_base = OTHER; note = 2'-fluoro modified nucleotide
  modified_base 25: mod_base = OTHER; note = 2'-O-methyl modified nucleotide
  modified_base 26: mod_base = OTHER; note = 2'-O-methyl modified nucleotide
  modified_base 27: mod_base = OTHER; note = 2'-O-methyl modified nucleotide
  modified_base 28: mod_base = OTHER; note = 2'-O-methyl modified nucleotide
  modified_base 29: mod_base = OTHER; note = 2'-O-methyl modified nucleotide
  modified_base 30: mod_base = OTHER; note = 2'-O-methyl modified nucleotide
  modified_base 31: mod_base = OTHER; note = 2'-O-methyl modified nucleotide
  modified_base 32: mod_base = OTHER; note = 2'-O-methyl modified nucleotide
  modified_base 33: mod_base = OTHER; note = 2'-O-methyl modified nucleotide
  misc_difference 34: note = 2'-O-methyl modified nucleotide may be trivalent N-acetylgalactosamine modified
ntcacagctgcctttcttaaaaggcagctgtgaa

SEQ ID NO: 1660 - RNA, 34 nt, synthetic construct
  source 1..34: mol_type = other RNA
  misc_difference 1: note = 2'-O-methyl modified nucleotide may be 5' phosphate modified
  modified_base 2: mod_base = OTHER; note = 2'-fluoro modified nucleotide
  modified_base 3: mod_base = OTHER; note = 2'-O-methyl modified nucleotide
  modified_base 4: mod_base = OTHER; note = 2'-O-methyl modified nucleotide
  modified_base 5: mod_base = OTHER; note = 2'-O-methyl modified nucleotide
  modified_base 6: mod_base = OTHER; note = 2'-O-methyl modified nucleotide
  modified_base 7: mod_base = OTHER; note = 2'-O-methyl modified nucleotide
  modified_base 8: mod_base = OTHER; note = 2'-O-methyl modified nucleotide
  modified_base 9: mod_base = OTHER; note = 2'-O-methyl modified nucleotide
  modified_base 10: mod_base = OTHER; note = 2'-O-methyl modified nucleotide
  modified_base 11: mod_base = OTHER; note = 2'-O-methyl modified nucleotide
  modified_base 12: mod_base = OTHER; note = 2'-O-methyl modified nucleotide
  modified_base 13: mod_base = OTHER; note = 2'-O-methyl modified nucleotide
  modified_base 14: mod_base = OTHER; note = 2'-fluoro modified nucleotide
  modified_base 15: mod_base = OTHER; note = 2'-O-methyl modified nucleotide
  modified_base 16: mod_base = OTHER; note = 2'-O-methyl modified nucleotide
  modified_base 17: mod_base = OTHER; note = 2'-O-methyl modified nucleotide
  modified_base 18: mod_base = OTHER; note = 2'-O-methyl modified nucleotide
  modified_base 19: mod_base = OTHER; note = 2'-O-methyl modified nucleotide
  modified_base 20: mod_base = OTHER; note = 2'-O-methyl modified nucleotide
  modified_base 21: mod_base = OTHER; note = 2'-O-methyl modified nucleotide
  modified_base 22: mod_base = OTHER; note = 2'-fluoro modified nucleotide
  modified_base 23: mod_base = OTHER; note = 2'-fluoro modified nucleotide
  modified_base 24: mod_base = OTHER; note = 2'-fluoro modified nucleotide
  modified_base 25: mod_base = OTHER; note = 2'-O-methyl modified nucleotide
  modified_base 26: mod_base = OTHER; note = 2'-O-methyl modified nucleotide
  modified_base 27: mod_base = OTHER; note = 2'-O-methyl modified nucleotide
  modified_base 28: mod_base = OTHER; note = 2'-O-methyl modified nucleotide
  modified_base 29: mod_base = OTHER; note = 2'-O-methyl modified nucleotide
  modified_base 30: mod_base = OTHER; note = 2'-O-methyl modified nucleotide
  modified_base 31: mod_base = OTHER; note = 2'-O-methyl modified nucleotide
  modified_base 32: mod_base = OTHER; note = 2'-O-methyl modified nucleotide
  modified_base 33: mod_base = OTHER; note = 2'-O-methyl modified nucleotide
  misc_difference 34: note = 2'-O-methyl modified nucleotide may be trivalent N-acetylgalactosamine modified
nggccgccagaatcacctctgattctggcggcca

SEQ ID NO: 1661 - RNA, 34 nt, synthetic construct
  source 1..34: mol_type = other RNA
  misc_difference 1: note = 2'-O-methyl modified nucleotide may be 5' phosphate modified
  modified_base 2: mod_base = OTHER; note = 2'-fluoro modified nucleotide
  modified_base 3: mod_base = OTHER; note = 2'-O-methyl modified nucleotide
  modified_base 4: mod_base = OTHER; note = 2'-O-methyl modified nucleotide
  modified_base 5: mod_base = OTHER; note = 2'-O-methyl modified nucleotide
  modified_base 6: mod_base = OTHER; note = 2'-O-methyl modified nucleotide
  modified_base 7: mod_base = OTHER; note = 2'-O-methyl modified nucleotide
  modified_base 8: mod_base = OTHER; note = 2'-O-methyl modified nucleotide
  modified_base 9: mod_base = OTHER; note = 2'-O-methyl modified nucleotide
  modified_base 10: mod_base = OTHER; note = 2'-O-methyl modified nucleotide
  modified_base 11: mod_base = OTHER; note = 2'-O-methyl modified nucleotide
  modified_base 12: mod_base = OTHER; note = 2'-O-methyl modified nucleotide
  modified_base 13: mod_base = OTHER; note = 2'-O-methyl modified nucleotide
  modified_base 14: mod_base = OTHER; note = 2'-fluoro modified nucleotide
  modified_base 15: mod_base = OTHER; note = 2'-O-methyl modified nucleotide
  modified_base 16: mod_base = OTHER; note = 2'-O-methyl modified nucleotide
  modified_base 17: mod_base = OTHER; note = 2'-O-methyl modified nucleotide
  modified_base 18: mod_base = OTHER; note = 2'-O-methyl modified nucleotide
  modified_base 19: mod_base = OTHER; note = 2'-O-methyl modified nucleotide
  modified_base 20: mod_base = OTHER; note = 2'-O-methyl modified nucleotide
  modified_base 21: mod_base = OTHER; note = 2'-O-methyl modified nucleotide
  modified_base 22: mod_base = OTHER; note = 2'-fluoro modified nucleotide
  modified_base 23: mod_base = OTHER; note = 2'-fluoro modified nucleotide
  modified_base 24: mod_base = OTHER; note = 2'-fluoro modified nucleotide
  modified_base 25: mod_base = OTHER; note = 2'-O-methyl modified nucleotide
  modified_base 26: mod_base = OTHER; note = 2'-O-methyl modified nucleotide
  modified_base 27: mod_base = OTHER; note = 2'-O-methyl modified nucleotide
  modified_base 28: mod_base = OTHER; note = 2'-O-methyl modified nucleotide
  modified_base 29: mod_base = OTHER; note = 2'-O-methyl modified nucleotide
  modified_base 30: mod_base = OTHER; note = 2'-O-methyl modified nucleotide
  modified_base 31: mod_base = OTHER; note = 2'-O-methyl modified nucleotide
  modified_base 32: mod_base = OTHER; note = 2'-O-methyl modified nucleotide
  modified_base 33: mod_base = OTHER; note = 2'-O-methyl modified nucleotide
  misc_difference 34: note = 2'-O-methyl modified nucleotide may be trivalent N-acetylgalactosamine modified
nccaagctgaaactccagagagtttcagcttgga

SEQ ID NO: 1662 - RNA, 34 nt, synthetic construct
  source 1..34: mol_type = other RNA
  misc_difference 1: note = 2'-O-methyl modified nucleotide may be 5' phosphate modified
  modified_base 2: mod_base = OTHER; note = 2'-fluoro modified nucleotide
  modified_base 3: mod_base = OTHER; note = 2'-O-methyl modified nucleotide
  modified_base 4: mod_base = OTHER; note = 2'-O-methyl modified nucleotide
  modified_base 5: mod_base = OTHER; note = 2'-O-methyl modified nucleotide
  modified_base 6: mod_base = OTHER; note = 2'-O-methyl modified nucleotide
  modified_base 7: mod_base = OTHER; note = 2'-O-methyl modified nucleotide
  modified_base 8: mod_base = OTHER; note = 2'-O-methyl modified nucleotide
  modified_base 9: mod_base = OTHER; note = 2'-O-methyl modified nucleotide
  modified_base 10: mod_base = OTHER; note = 2'-O-methyl modified nucleotide
  modified_base 11: mod_base = OTHER; note = 2'-O-methyl modified nucleotide
  modified_base 12: mod_base = OTHER; note = 2'-O-methyl modified nucleotide
  modified_base 13: mod_base = OTHER; note = 2'-O-methyl modified nucleotide
  modified_base 14: mod_base = OTHER; note = 2'-fluoro modified nucleotide
  modified_base 15: mod_base = OTHER; note = 2'-O-methyl modified nucleotide
  modified_base 16: mod_base = OTHER; note = 2'-O-methyl modified nucleotide
  modified_base 17: mod_base = OTHER; note = 2'-O-methyl modified nucleotide
  modified_base 18: mod_base = OTHER; note = 2'-O-methyl modified nucleotide
  modified_base 19: mod_base = OTHER; note = 2'-O-methyl modified nucleotide
  modified_base 20: mod_base = OTHER; note = 2'-O-methyl modified nucleotide
  modified_base 21: mod_base = OTHER; note = 2'-O-methyl modified nucleotide
  modified_base 22: mod_base = OTHER; note = 2'-fluoro modified nucleotide
  modified_base 23: mod_base = OTHER; note = 2'-fluoro modified nucleotide
  modified_base 24: mod_base = OTHER; note = 2'-fluoro modified nucleotide
  modified_base 25: mod_base = OTHER; note = 2'-O-methyl modified nucleotide
  modified_base 26: mod_base = OTHER; note = 2'-O-methyl modified nucleotide
  modified_base 27: mod_base = OTHER; note = 2'-O-methyl modified nucleotide
  modified_base 28: mod_base = OTHER; note = 2'-O-methyl modified nucleotide
  modified_base 29: mod_base = OTHER; note = 2'-O-methyl modified nucleotide
  modified_base 30: mod_base = OTHER; note = 2'-O-methyl modified nucleotide
  modified_base 31: mod_base = OTHER; note = 2'-O-methyl modified nucleotide
  modified_base 32: mod_base = OTHER; note = 2'-O-methyl modified nucleotide
  modified_base 33: mod_base = OTHER; note = 2'-O-methyl modified nucleotide
  misc_difference 34: note = 2'-O-methyl modified nucleotide may be trivalent N-acetylgalactosamine modified
nttgatcagggcaacgtcagttgccctgatcaaa

SEQ ID NO: 1663 - RNA, 34 nt, synthetic construct
  source 1..34: mol_type = other RNA
  misc_difference 1: note = 2'-O-methyl modified nucleotide may be 5' phosphate modified
  modified_base 2: mod_base = OTHER; note = 2'-fluoro modified nucleotide
  modified_base 3: mod_base = OTHER; note = 2'-O-methyl modified nucleotide
  modified_base 4: mod_base = OTHER; note = 2'-O-methyl modified nucleotide
  modified_base 5: mod_base = OTHER; note = 2'-O-methyl modified nucleotide
  modified_base 6: mod_base = OTHER; note = 2'-O-methyl modified nucleotide
  modified_base 7: mod_base = OTHER; note = 2'-O-methyl modified nucleotide
  modified_base 8: mod_base = OTHER; note = 2'-O-methyl modified nucleotide
  modified_base 9: mod_base = OTHER; note = 2'-O-methyl modified nucleotide
  modified_base 10: mod_base = OTHER; note = 2'-O-methyl modified nucleotide
  modified_base 11: mod_base = OTHER; note = 2'-O-methyl modified nucleotide
  modified_base 12: mod_base = OTHER; note = 2'-O-methyl modified nucleotide
  modified_base 13: mod_base = OTHER; note = 2'-O-methyl modified nucleotide
  modified_base 14: mod_base = OTHER; note = 2'-fluoro modified nucleotide
  modified_base 15: mod_base = OTHER; note = 2'-O-methyl modified nucleotide
  modified_base 16: mod_base = OTHER; note = 2'-O-methyl modified nucleotide
  modified_base 17: mod_base = OTHER; note = 2'-O-methyl modified nucleotide
  modified_base 18: mod_base = OTHER; note = 2'-O-methyl modified nucleotide
  modified_base 19: mod_base = OTHER; note = 2'-O-methyl modified nucleotide
  modified_base 20: mod_base = OTHER; note = 2'-O-methyl modified nucleotide
  modified_base 21: mod_base = OTHER; note = 2'-O-methyl modified nucleotide
  modified_base 22: mod_base = OTHER; note = 2'-fluoro modified nucleotide
  modified_base 23: mod_base = OTHER; note = 2'-fluoro modified nucleotide
  modified_base 24: mod_base = OTHER; note = 2'-fluoro modified nucleotide
  modified_base 25: mod_base = OTHER; note = 2'-O-methyl modified nucleotide
  modified_base 26: mod_base = OTHER; note = 2'-O-methyl modified nucleotide
  modified_base 27: mod_base = OTHER; note = 2'-O-methyl modified nucleotide
  modified_base 28: mod_base = OTHER; note = 2'-O-methyl modified nucleotide
  modified_base 29: mod_base = OTHER; note = 2'-O-methyl modified nucleotide
  modified_base 30: mod_base = OTHER; note = 2'-O-methyl modified nucleotide
  modified_base 31: mod_base = OTHER; note = 2'-O-methyl modified nucleotide
  modified_base 32: mod_base = OTHER; note = 2'-O-methyl modified nucleotide
  modified_base 33: mod_base = OTHER; note = 2'-O-methyl modified nucleotide
  misc_difference 34: note = 2'-O-methyl modified nucleotide may be trivalent N-acetylgalactosamine modified
ngttcccaaaccatgccaccatggtttgggaaca

SEQ ID NO: 1664 - RNA, 34 nt, synthetic construct
  source 1..34: mol_type = other RNA
  misc_difference 1: note = 2'-O-methyl modified nucleotide may be 5' phosphate modified
  modified_base 2: mod_base = OTHER; note = 2'-fluoro modified nucleotide
  modified_base 3: mod_base = OTHER; note = 2'-O-methyl modified nucleotide
  modified_base 4: mod_base = OTHER; note = 2'-O-methyl modified nucleotide
  modified_base 5: mod_base = OTHER; note = 2'-O-methyl modified nucleotide
  modified_base 6: mod_base = OTHER; note = 2'-O-methyl modified nucleotide
  modified_base 7: mod_base = OTHER; note = 2'-O-methyl modified nucleotide
  modified_base 8: mod_base = OTHER; note = 2'-O-methyl modified nucleotide
  modified_base 9: mod_base = OTHER; note = 2'-O-methyl modified nucleotide
  modified_base 10: mod_base = OTHER; note = 2'-O-methyl modified nucleotide
  modified_base 11: mod_base = OTHER; note = 2'-O-methyl modified nucleotide
  modified_base 12: mod_base = OTHER; note = 2'-O-methyl modified nucleotide
  modified_base 13: mod_base = OTHER; note = 2'-O-methyl modified nucleotide
  modified_base 14: mod_base = OTHER; note = 2'-fluoro modified nucleotide
  modified_base 15: mod_base = OTHER; note = 2'-O-methyl modified nucleotide
  modified_base 16: mod_base = OTHER; note = 2'-O-methyl modified nucleotide
  modified_base 17: mod_base = OTHER; note = 2'-O-methyl modified nucleotide
  modified_base 18: mod_base = OTHER; note = 2'-O-methyl modified nucleotide
  modified_base 19: mod_base = OTHER; note = 2'-O-methyl modified nucleotide
  modified_base 20: mod_base = OTHER; note = 2'-O-methyl modified nucleotide
  modified_base 21: mod_base = OTHER; note = 2'-O-methyl modified nucleotide
  modified_base 22: mod_base = OTHER; note = 2'-fluoro modified nucleotide
  modified_base 23: mod_base = OTHER; note = 2'-fluoro modified nucleotide
  modified_base 24: mod_base = OTHER; note = 2'-fluoro modified nucleotide
  modified_base 25: mod_base = OTHER; note = 2'-O-methyl modified nucleotide
  modified_base 26: mod_base = OTHER; note = 2'-O-methyl modified nucleotide
  modified_base 27: mod_base = OTHER; note = 2'-O-methyl modified nucleotide
  modified_base 28: mod_base = OTHER; note = 2'-O-methyl modified nucleotide
  modified_base 29: mod_base = OTHER; note = 2'-O-methyl modified nucleotide
  modified_base 30: mod_base = OTHER; note = 2'-O-methyl modified nucleotide
  modified_base 31: mod_base = OTHER; note = 2'-O-methyl modified nucleotide
  modified_base 32: mod_base = OTHER; note = 2'-O-methyl modified nucleotide
  modified_base 33: mod_base = OTHER; note = 2'-O-methyl modified nucleotide
  misc_difference 34: note = 2'-O-methyl modified nucleotide may be trivalent N-acetylgalactosamine modified
nacctgcttttgccgcttccggcaaaagcaggta

SEQ ID NO: 1665 - RNA, 34 nt, synthetic construct
  source 1..34: mol_type = other RNA
  misc_difference 1: note = 2'-O-methyl modified nucleotide may be 5' phosphate modified
  modified_base 2: mod_base = OTHER; note = 2'-fluoro modified nucleotide
  modified_base 3: mod_base = OTHER; note = 2'-O-methyl modified nucleotide
  modified_base 4: mod_base = OTHER; note = 2'-O-methyl modified nucleotide
  modified_base 5: mod_base = OTHER; note = 2'-O-methyl modified nucleotide
  modified_base 6: mod_base = OTHER; note = 2'-O-methyl modified nucleotide
  modified_base 7: mod_base = OTHER; note = 2'-O-methyl modified nucleotide
  modified_base 8: mod_base = OTHER; note = 2'-O-methyl modified nucleotide
  modified_base 9: mod_base = OTHER; note = 2'-O-methyl modified nucleotide
  modified_base 10: mod_base = OTHER; note = 2'-O-methyl modified nucleotide
  modified_base 11: mod_base = OTHER; note = 2'-O-methyl modified nucleotide
  modified_base 12: mod_base = OTHER; note = 2'-O-methyl modified nucleotide
  modified_base 13: mod_base = OTHER; note = 2'-O-methyl modified nucleotide
  modified_base 14: mod_base = OTHER; note = 2'-fluoro modified nucleotide
  modified_base 15: mod_base = OTHER; note = 2'-O-methyl modified nucleotide
  modified_base 16: mod_base = OTHER; note = 2'-O-methyl modified nucleotide
  modified_base 17: mod_base = OTHER; note = 2'-O-methyl modified nucleotide
  modified_base 18: mod_base = OTHER; note = 2'-O-methyl modified nucleotide
  modified_base 19: mod_base = OTHER; note = 2'-O-methyl modified nucleotide
  modified_base 20: mod_base = OTHER; note = 2'-O-methyl modified nucleotide
  modified_base 21: mod_base = OTHER; note = 2'-O-methyl modified nucleotide
  modified_base 22: mod_base = OTHER; note = 2'-fluoro modified nucleotide
  modified_base 23: mod_base = OTHER; note = 2'-fluoro modified nucleotide
  modified_base 24: mod_base = OTHER; note = 2'-fluoro modified nucleotide
  modified_base 25: mod_base = OTHER; note = 2'-O-methyl modified nucleotide
  modified_base 26: mod_base = OTHER; note = 2'-O-methyl modified nucleotide
  modified_base 27: mod_base = OTHER; note = 2'-O-methyl modified nucleotide
  modified_base 28: mod_base = OTHER; note = 2'-O-methyl modified nucleotide
  modified_base 29: mod_base = OTHER; note = 2'-O-methyl modified nucleotide
  modified_base 30: mod_base = OTHER; note = 2'-O-methyl modified nucleotide
  modified_base 31: mod_base = OTHER; note = 2'-O-methyl modified nucleotide
  modified_base 32: mod_base = OTHER; note = 2'-O-methyl modified nucleotide
  modified_base 33: mod_base = OTHER; note = 2'-O-methyl modified nucleotide
  misc_difference 34: note = 2'-O-methyl modified nucleotide may be trivalent N-acetylgalactosamine modified
nttgctcattgtctttcttaagacaatgagcaaa

SEQ ID NO: 1666 - RNA, 34 nt, synthetic construct
  source 1..34: mol_type = other RNA
  misc_difference 1: note = 2'-O-methyl modified nucleotide may be 5' phosphate modified
  modified_base 2: mod_base = OTHER; note = 2'-fluoro modified nucleotide
  modified_base 3: mod_base = OTHER; note = 2'-O-methyl modified nucleotide
  modified_base 4: mod_base = OTHER; note = 2'-O-methyl modified nucleotide
  modified_base 5: mod_base = OTHER; note = 2'-O-methyl modified nucleotide
  modified_base 6: mod_base = OTHER; note = 2'-O-methyl modified nucleotide
  modified_base 7: mod_base = OTHER; note = 2'-O-methyl modified nucleotide
  modified_base 8: mod_base = OTHER; note = 2'-O-methyl modified nucleotide
  modified_base 9: mod_base = OTHER; note = 2'-O-methyl modified nucleotide
  modified_base 10: mod_base = OTHER; note = 2'-O-methyl modified nucleotide
  modified_base 11: mod_base = OTHER; note = 2'-O-methyl modified nucleotide
  modified_base 12: mod_base = OTHER; note = 2'-O-methyl modified nucleotide
  modified_base 13: mod_base = OTHER; note = 2'-O-methyl modified nucleotide
  modified_base 14: mod_base = OTHER; note = 2'-fluoro modified nucleotide
  modified_base 15: mod_base = OTHER; note = 2'-O-methyl modified nucleotide
  modified_base 16: mod_base = OTHER; note = 2'-O-methyl modified nucleotide
  modified_base 17: mod_base = OTHER; note = 2'-O-methyl modified nucleotide
  modified_base 18: mod_base = OTHER; note = 2'-O-methyl modified nucleotide
  modified_base 19: mod_base = OTHER; note = 2'-O-methyl modified nucleotide
  modified_base 20: mod_base = OTHER; note = 2'-O-methyl modified nucleotide
  modified_base 21: mod_base = OTHER; note = 2'-O-methyl modified nucleotide
  modified_base 22: mod_base = OTHER; note = 2'-fluoro modified nucleotide
  modified_base 23: mod_base = OTHER; note = 2'-fluoro modified nucleotide
  modified_base 24: mod_base = OTHER; note = 2'-fluoro modified nucleotide
  modified_base 25: mod_base = OTHER; note = 2'-O-methyl modified nucleotide
  modified_base 26: mod_base = OTHER; note = 2'-O-methyl modified nucleotide
  modified_base 27: mod_base = OTHER; note = 2'-O-methyl modified nucleotide
  modified_base 28: mod_base = OTHER; note = 2'-O-methyl modified nucleotide
  modified_base 29: mod_base = OTHER; note = 2'-O-methyl modified nucleotide
  modified_base 30: mod_base = OTHER; note = 2'-O-methyl modified nucleotide
  modified_base 31: mod_base = OTHER; note = 2'-O-methyl modified nucleotide
  modified_base 32: mod_base = OTHER; note = 2'-O-methyl modified nucleotide
  modified_base 33: mod_base = OTHER; note = 2'-O-methyl modified nucleotide
  misc_difference 34: note = 2'-O-methyl modified nucleotide may be trivalent N-acetylgalactosamine modified
ncacgttcgccgctgggagcagcggcgaacgtga

SEQ ID NO: 1667 - RNA, 34 nt, synthetic construct
  source 1..34: mol_type = other RNA
  misc_difference 1: note = 2'-O-methyl modified nucleotide may be 5' phosphate modified
  modified_base 2: mod_base = OTHER; note = 2'-fluoro modified nucleotide
  modified_base 3: mod_base = OTHER; note = 2'-O-methyl modified nucleotide
  modified_base 4: mod_base = OTHER; note = 2'-O-methyl modified nucleotide
  modified_base 5: mod_base = OTHER; note = 2'-O-methyl modified nucleotide
  modified_base 6: mod_base = OTHER; note = 2'-O-methyl modified nucleotide
  modified_base 7: mod_base = OTHER; note = 2'-O-methyl modified nucleotide
  modified_base 8: mod_base = OTHER; note = 2'-O-methyl modified nucleotide
  modified_base 9: mod_base = OTHER; note = 2'-O-methyl modified nucleotide
  modified_base 10: mod_base = OTHER; note = 2'-O-methyl modified nucleotide
  modified_base 11: mod_base = OTHER; note = 2'-O-methyl modified nucleotide
  modified_base 12: mod_base = OTHER; note = 2'-O-methyl modified nucleotide
  modified_base 13: mod_base = OTHER; note = 2'-O-methyl modified nucleotide
  modified_base 14: mod_base = OTHER; note = 2'-fluoro modified nucleotide
  modified_base 15: mod_base = OTHER; note = 2'-O-methyl modified nucleotide
  modified_base 16: mod_base = OTHER; note = 2'-O-methyl modified nucleotide
  modified_base 17: mod_base = OTHER; note = 2'-O-methyl modified nucleotide
  modified_base 18: mod_base = OTHER; note = 2'-O-methyl modified nucleotide
  modified_base 19: mod_base = OTHER; note = 2'-O-methyl modified nucleotide
  modified_base 20: mod_base = OTHER; note = 2'-O-methyl modified nucleotide
  modified_base 21: mod_base = OTHER; note = 2'-O-methyl modified nucleotide
  modified_base 22: mod_base = OTHER; note = 2'-fluoro modified nucleotide
  modified_base 23: mod_base = OTHER; note = 2'-fluoro modified nucleotide
  modified_base 24: mod_base = OTHER; note = 2'-fluoro modified nucleotide
  modified_base 25: mod_base = OTHER; note = 2'-O-methyl modified nucleotide
  modified_base 26: mod_base = OTHER; note = 2'-O-methyl modified nucleotide
  modified_base 27: mod_base = OTHER; note = 2'-O-methyl modified nucleotide
  modified_base 28: mod_base = OTHER; note = 2'-O-methyl modified nucleotide
  modified_base 29: mod_base = OTHER; note = 2'-O-methyl modified nucleotide
  modified_base 30: mod_base = OTHER; note = 2'-O-methyl modified nucleotide
  modified_base 31: mod_base = OTHER; note = 2'-O-methyl modified nucleotide
  modified_base 32: mod_base = OTHER; note = 2'-O-methyl modified nucleotide
  modified_base 33: mod_base = OTHER; note = 2'-O-methyl modified nucleotide
  misc_difference 34: note = 2'-O-methyl modified nucleotide may be trivalent N-acetylgalactosamine modified
ncattcttgatgtagacctctacatcaagaatga

SEQ ID NO: 1668 - RNA, 34 nt, synthetic construct
  source 1..34: mol_type = other RNA
  misc_difference 1: note = 2'-O-methyl modified nucleotide may be 5' phosphate modified
  modified_base 2: mod_base = OTHER; note = 2'-fluoro modified nucleotide
  modified_base 3: mod_base = OTHER; note = 2'-O-methyl modified nucleotide
  modified_base 4: mod_base = OTHER; note = 2'-O-methyl modified nucleotide
  modified_base 5: mod_base = OTHER; note = 2'-O-methyl modified nucleotide
  modified_base 6: mod_base = OTHER; note = 2'-O-methyl modified nucleotide
  modified_base 7: mod_base = OTHER; note = 2'-O-methyl modified nucleotide
  modified_base 8: mod_base = OTHER; note = 2'-O-methyl modified nucleotide
  modified_base 9: mod_base = OTHER; note = 2'-O-methyl modified nucleotide
  modified_base 10: mod_base = OTHER; note = 2'-O-methyl modified nucleotide
  modified_base 11: mod_base = OTHER; note = 2'-O-methyl modified nucleotide
  modified_base 12: mod_base = OTHER; note = 2'-O-methyl modified nucleotide
  modified_base 13: mod_base = OTHER; note = 2'-O-methyl modified nucleotide
  modified_base 14: mod_base = OTHER; note = 2'-fluoro modified nucleotide
  modified_base 15: mod_base = OTHER; note = 2'-O-methyl modified nucleotide
  modified_base 16: mod_base = OTHER; note = 2'-O-methyl modified nucleotide
  modified_base 17: mod_base = OTHER; note = 2'-O-methyl modified nucleotide
  modified_base 18: mod_base = OTHER; note = 2'-O-methyl modified nucleotide
  modified_base 19: mod_base = OTHER; note = 2'-O-methyl modified nucleotide
  modified_base 20: mod_base = OTHER; note = 2'-O-methyl modified nucleotide
  modified_base 21: mod_base = OTHER; note = 2'-O-methyl modified nucleotide
  modified_base 22: mod_base = OTHER; note = 2'-fluoro modified nucleotide
  modified_base 23: mod_base = OTHER; note = 2'-fluoro modified nucleotide
  modified_base 24: mod_base = OTHER; note = 2'-fluoro modified nucleotide
  modified_base 25: mod_base = OTHER; note = 2'-O-methyl modified nucleotide
  modified_base 26: mod_base = OTHER; note = 2'-O-methyl modified nucleotide
  modified_base 27: mod_base = OTHER; note = 2'-O-methyl modified nucleotide
  modified_base 28: mod_base = OTHER; note = 2'-O-methyl modified nucleotide
  modified_base 29: mod_base = OTHER; note = 2'-O-methyl modified nucleotide
  modified_base 30: mod_base = OTHER; note = 2'-O-methyl modified nucleotide
  modified_base 31: mod_base = OTHER; note = 2'-O-methyl modified nucleotide
  modified_base 32: mod_base = OTHER; note = 2'-O-methyl modified nucleotide
  modified_base 33: mod_base = OTHER; note = 2'-O-methyl modified nucleotide
  misc_difference 34: note = 2'-O-methyl modified nucleotide may be trivalent N-acetylgalactosamine modified
nttgagcttgatcagggcactgatcaagctcaaa

SEQ ID NO: 1669 - RNA, 34 nt, synthetic construct
  source 1..34: mol_type = other RNA
  misc_difference 1: note = 2'-O-methyl modified nucleotide may be 5' phosphate modified
  modified_base 2: mod_base = OTHER; note = 2'-fluoro modified nucleotide
  modified_base 3: mod_base = OTHER; note = 2'-O-methyl modified nucleotide
  modified_base 4: mod_base = OTHER; note = 2'-O-methyl modified nucleotide
  modified_base 5: mod_base = OTHER; note = 2'-O-methyl modified nucleotide
  modified_base 6: mod_base = OTHER; note = 2'-O-methyl modified nucleotide
  modified_base 7: mod_base = OTHER; note = 2'-O-methyl modified nucleotide
  modified_base 8: mod_base = OTHER; note = 2'-O-methyl modified nucleotide
  modified_base 9: mod_base = OTHER; note = 2'-O-methyl modified nucleotide
  modified_base 10: mod_base = OTHER; note = 2'-O-methyl modified nucleotide
  modified_base 11: mod_base = OTHER; note = 2'-O-methyl modified nucleotide
  modified_base 12: mod_base = OTHER; note = 2'-O-methyl modified nucleotide
  modified_base 13: mod_base = OTHER; note = 2'-O-methyl modified nucleotide
  modified_base 14: mod_base = OTHER; note = 2'-fluoro modified nucleotide
  modified_base 15: mod_base = OTHER; note = 2'-O-methyl modified nucleotide
  modified_base 16: mod_base = OTHER; note = 2'-O-methyl modified nucleotide
  modified_base 17: mod_base = OTHER; note = 2'-O-methyl modified nucleotide
  modified_base 18: mod_base = OTHER; note = 2'-O-methyl modified nucleotide
  modified_base 19: mod_base = OTHER; note = 2'-O-methyl modified nucleotide
  modified_base 20: mod_base = OTHER; note = 2'-O-methyl modified nucleotide
  modified_base 21: mod_base = OTHER; note = 2'-O-methyl modified nucleotide
  modified_base 22: mod_base = OTHER; note = 2'-fluoro modified nucleotide
  modified_base 23: mod_base = OTHER; note = 2'-fluoro modified nucleotide
  modified_base 24: mod_base = OTHER; note = 2'-fluoro modified nucleotide
  modified_base 25: mod_base = OTHER; note = 2'-O-methyl modified nucleotide
  modified_base 26: mod_base = OTHER; note = 2'-O-methyl modified nucleotide
  modified_base 27: mod_base = OTHER; note = 2'-O-methyl modified nucleotide
  modified_base 28: mod_base = OTHER; note = 2'-O-methyl modified nucleotide
  modified_base 29: mod_base = OTHER; note = 2'-O-methyl modified nucleotide
  modified_base 30: mod_base = OTHER; note = 2'-O-methyl modified nucleotide
  modified_base 31: mod_base = OTHER; note = 2'-O-methyl modified nucleotide
  modified_base 32: mod_base = OTHER; note = 2'-O-methyl modified nucleotide
  modified_base 33: mod_base = OTHER; note = 2'-O-methyl modified nucleotide
  misc_difference 34: note = 2'-O-methyl modified nucleotide may be trivalent N-acetylgalactosamine modified
nattcttgatgtagacctctctacatcaagaata

SEQ ID NO: 1670 - RNA, 34 nt, synthetic construct
  source 1..34: mol_type = other RNA
  misc_difference 1: note = 2'-O-methyl modified nucleotide may be 5' phosphate modified
  modified_base 2: mod_base = OTHER; note = 2'-fluoro modified nucleotide
  modified_base 3: mod_base = OTHER; note = 2'-O-methyl modified nucleotide
  modified_base 4: mod_base = OTHER; note = 2'-O-methyl modified nucleotide
  modified_base 5: mod_base = OTHER; note = 2'-O-methyl modified nucleotide
  modified_base 6: mod_base = OTHER; note = 2'-O-methyl modified nucleotide
  modified_base 7: mod_base = OTHER; note = 2'-O-methyl modified nucleotide
  modified_base 8: mod_base = OTHER; note = 2'-O-methyl modified nucleotide
  modified_base 9: mod_base = OTHER; note = 2'-O-methyl modified nucleotide
  modified_base 10: mod_base = OTHER; note = 2'-O-methyl modified nucleotide
  modified_base 11: mod_base = OTHER; note = 2'-O-methyl modified nucleotide
  modified_base 12: mod_base = OTHER; note = 2'-O-methyl modified nucleotide
  modified_base 13: mod_base = OTHER; note = 2'-O-methyl modified nucleotide
  modified_base 14: mod_base = OTHER; note = 2'-fluoro modified nucleotide
  modified_base 15: mod_base = OTHER; note = 2'-O-methyl modified nucleotide
  modified_base 16: mod_base = OTHER; note = 2'-O-methyl modified nucleotide
  modified_base 17: mod_base = OTHER; note = 2'-O-methyl modified nucleotide
  modified_base 18: mod_base = OTHER; note = 2'-O-methyl modified nucleotide
  modified_base 19: mod_base = OTHER; note = 2'-O-methyl modified nucleotide
  modified_base 20: mod_base = OTHER; note = 2'-O-methyl modified nucleotide
  modified_base 21: mod_base = OTHER; note = 2'-O-methyl modified nucleotide
  modified_base 22: mod_base = OTHER; note = 2'-fluoro modified nucleotide
  modified_base 23: mod_base = OTHER; note = 2'-fluoro modified nucleotide
  modified_base 24: mod_base = OTHER; note = 2'-fluoro modified nucleotide
  modified_base 25: mod_base = OTHER; note = 2'-O-methyl modified nucleotide
  modified_base 26: mod_base = OTHER; note = 2'-O-methyl modified nucleotide
  modified_base 27: mod_base = OTHER; note = 2'-O-methyl modified nucleotide
  modified_base 28: mod_base = OTHER; note = 2'-O-methyl modified nucleotide
  modified_base 29: mod_base = OTHER; note = 2'-O-methyl modified nucleotide
  modified_base 30: mod_base = OTHER; note = 2'-O-methyl modified nucleotide
  modified_base 31: mod_base = OTHER; note = 2'-O-methyl modified nucleotide
  modified_base 32: mod_base = OTHER; note = 2'-O-methyl modified nucleotide
  modified_base 33: mod_base = OTHER; note = 2'-O-methyl modified nucleotide
  misc_difference 34: note = 2'-O-methyl modified nucleotide may be trivalent N-acetylgalactosamine modified
ntgaaggagtcttggcaggccaagactccttcaa

SEQ ID NO: 1671 - RNA, 34 nt, synthetic construct
  source 1..34: mol_type = other RNA
  misc_difference 1: note = 2'-O-methyl modified nucleotide may be 5' phosphate modified
  modified_base 2: mod_base = OTHER; note = 2'-fluoro modified nucleotide
  modified_base 3: mod_base = OTHER; note = 2'-O-methyl modified nucleotide
  modified_base 4: mod_base = OTHER; note = 2'-O-methyl modified nucleotide
  modified_base 5: mod_base = OTHER; note = 2'-O-methyl modified nucleotide
  modified_base 6: mod_base = OTHER; note = 2'-O-methyl modified nucleotide
  modified_base 7: mod_base = OTHER; note = 2'-O-methyl modified nucleotide
  modified_base 8: mod_base = OTHER; note = 2'-O-methyl modified nucleotide
  modified_base 9: mod_base = OTHER; note = 2'-O-methyl modified nucleotide
  modified_base 10: mod_base = OTHER; note = 2'-O-methyl modified nucleotide
  modified_base 11: mod_base = OTHER; note = 2'-O-methyl modified nucleotide
  modified_base 12: mod_base = OTHER; note = 2'-O-methyl modified nucleotide
  modified_base 13: mod_base = OTHER; note = 2'-O-methyl modified nucleotide
  modified_base 14: mod_base = OTHER; note = 2'-fluoro modified nucleotide
  modified_base 15: mod_base = OTHER; note = 2'-O-methyl modified nucleotide
  modified_base 16: mod_base = OTHER; note = 2'-O-methyl modified nucleotide
  modified_base 17: mod_base = OTHER; note = 2'-O-methyl modified nucleotide
  modified_base 18: mod_base = OTHER; note = 2'-O-methyl modified nucleotide
  modified_base 19: mod_base = OTHER; note = 2'-O-methyl modified nucleotide
  modified_base 20: mod_base = OTHER; note = 2'-O-methyl modified nucleotide
  modified_base 21: mod_base = OTHER; note = 2'-O-methyl modified nucleotide
  modified_base 22: mod_base = OTHER; note = 2'-fluoro modified nucleotide
  modified_base 23: mod_base = OTHER; note = 2'-fluoro modified nucleotide
  modified_base 24: mod_base = OTHER; note = 2'-fluoro modified nucleotide
  modified_base 25: mod_base = OTHER; note = 2'-O-methyl modified nucleotide
  modified_base 26: mod_base = OTHER; note = 2'-O-methyl modified nucleotide
  modified_base 27: mod_base = OTHER; note = 2'-O-methyl modified nucleotide
  modified_base 28: mod_base = OTHER; note = 2'-O-methyl modified nucleotide
  modified_base 29: mod_base = OTHER; note = 2'-O-methyl modified nucleotide
  modified_base 30: mod_base = OTHER; note = 2'-O-methyl modified nucleotide
  modified_base 31: mod_base = OTHER; note = 2'-O-methyl modified nucleotide
  modified_base 32: mod_base = OTHER; note = 2'-O-methyl modified nucleotide
  modified_base 33: mod_base = OTHER; note = 2'-O-methyl modified nucleotide
  misc_difference 34: note = 2'-O-methyl modified nucleotide may be trivalent N-acetylgalactosamine modified
nttggcttcacaccataactggtgtgaagccaaa

SEQ ID NO: 1672 - RNA, 34 nt, synthetic construct
  source 1..34: mol_type = other RNA
  misc_difference 1: note = 2'-O-methyl modified nucleotide may be 5' phosphate modified
  modified_base 2: mod_base = OTHER; note = 2'-fluoro modified nucleotide
  modified_base 3: mod_base = OTHER; note = 2'-O-methyl modified nucleotide
  modified_base 4: mod_base = OTHER; note = 2'-O-methyl modified nucleotide
  modified_base 5: mod_base = OTHER; note = 2'-O-methyl modified nucleotide
  modified_base 6: mod_base = OTHER; note = 2'-O-methyl modified nucleotide
  modified_base 7: mod_base = OTHER; note = 2'-O-methyl modified nucleotide
  modified_base 8: mod_base = OTHER; note = 2'-O-methyl modified nucleotide
  modified_base 9: mod_base = OTHER; note = 2'-O-methyl modified nucleotide
  modified_base 10: mod_base = OTHER; note = 2'-O-methyl modified nucleotide
  modified_base 11: mod_base = OTHER; note = 2'-O-methyl modified nucleotide
  modified_base 12: mod_base = OTHER; note = 2'-O-methyl modified nucleotide
  modified_base 13: mod_base = OTHER; note = 2'-O-methyl modified nucleotide
  modified_base 14: mod_base = OTHER; note = 2'-fluoro modified nucleotide
  modified_base 15: mod_base = OTHER; note = 2'-O-methyl modified nucleotide
  modified_base 16: mod_base = OTHER; note = 2'-O-methyl modified nucleotide
  modified_base 17: mod_base = OTHER; note = 2'-O-methyl modified nucleotide
  modified_base 18: mod_base = OTHER; note = 2'-O-methyl modified nucleotide
  modified_base 19: mod_base = OTHER; note = 2'-O-methyl modified nucleotide
  modified_base 20: mod_base = OTHER; note = 2'-O-methyl modified nucleotide
  modified_base 21: mod_base = OTHER; note = 2'-O-methyl modified nucleotide
  modified_base 22: mod_base = OTHER; note = 2'-fluoro modified nucleotide
  modified_base 23: mod_base = OTHER; note = 2'-fluoro modified nucleotide
  modified_base 24: mod_base = OTHER; note = 2'-fluoro modified nucleotide
  modified_base 25: mod_base = OTHER; note = 2'-O-methyl modified nucleotide
  modified_base 26: mod_base = OTHER; note = 2'-O-methyl modified nucleotide
  modified_base 27: mod_base = OTHER; note = 2'-O-methyl modified nucleotide
  modified_base 28: mod_base = OTHER; note = 2'-O-methyl modified nucleotide
  modified_base 29: mod_base = OTHER; note = 2'-O-methyl modified nucleotide
  modified_base 30: mod_base = OTHER; note = 2'-O-methyl modified nucleotide
  modified_base 31: mod_base = OTHER; note = 2'-O-methyl modified nucleotide
  modified_base 32: mod_base = OTHER; note = 2'-O-methyl modified nucleotide
  modified_base 33: mod_base = OTHER; note = 2'-O-methyl modified nucleotide
  misc_difference 34: note = 2'-O-methyl modified nucleotide may be trivalent N-acetylgalactosamine modified
natcttggcttcacaccattgtgaagccaagata

SEQ ID NO: 1673 - RNA, 34 nt, synthetic construct
  source 1..34: mol_type = other RNA
  misc_difference 1: note = 2'-O-methyl modified nucleotide may be 5' phosphate modified
  modified_base 2: mod_base = OTHER; note = 2'-fluoro modified nucleotide
  modified_base 3: mod_base = OTHER; note = 2'-O-methyl modified nucleotide
  modified_base 4: mod_base = OTHER; note = 2'-O-methyl modified nucleotide
  modified_base 5: mod_base = OTHER; note = 2'-O-methyl modified nucleotide
  modified_base 6: mod_base = OTHER; note = 2'-O-methyl modified nucleotide
  modified_base 7: mod_base = OTHER; note = 2'-O-methyl modified nucleotide
  modified_base 8: mod_base = OTHER; note = 2'-O-methyl modified nucleotide
  modified_base 9: mod_base = OTHER; note = 2'-O-methyl modified nucleotide
  modified_base 10: mod_base = OTHER; note = 2'-O-methyl modified nucleotide
  modified_base 11: mod_base = OTHER; note = 2'-O-methyl modified nucleotide
  modified_base 12: mod_base = OTHER; note = 2'-O-methyl modified nucleotide
  modified_base 13: mod_base = OTHER; note = 2'-O-methyl modified nucleotide
  modified_base 14: mod_base = OTHER; note = 2'-fluoro modified nucleotide
  modified_base 15: mod_base = OTHER; note = 2'-O-methyl modified nucleotide
  modified_base 16: mod_base = OTHER; note = 2'-O-methyl modified nucleotide
  modified_base 17: mod_base = OTHER; note = 2'-O-methyl modified nucleotide
  modified_base 18: mod_base = OTHER; note = 2'-O-methyl modified nucleotide
  modified_base 19: mod_base = OTHER; note = 2'-O-methyl modified nucleotide
  modified_base 20: mod_base = OTHER; note = 2'-O-methyl modified nucleotide
  modified_base 21: mod_base = OTHER; note = 2'-O-methyl modified nucleotide
  modified_base 22: mod_base = OTHER; note = 2'-fluoro modified nucleotide
  modified_base 23: mod_base = OTHER; note = 2'-fluoro modified nucleotide
  modified_base 24: mod_base = OTHER; note = 2'-fluoro modified nucleotide
  modified_base 25: mod_base = OTHER; note = 2'-O-methyl modified nucleotide
  modified_base 26: mod_base = OTHER; note = 2'-O-methyl modified nucleotide
  modified_base 27: mod_base = OTHER; note = 2'-O-methyl modified nucleotide
  modified_base 28: mod_base = OTHER; note = 2'-O-methyl modified nucleotide
  modified_base 29: mod_base = OTHER; note = 2'-O-methyl modified nucleotide
  modified_base 30: mod_base = OTHER; note = 2'-O-methyl modified nucleotide
  modified_base 31: mod_base = OTHER; note = 2'-O-methyl modified nucleotide
  modified_base 32: mod_base = OTHER; note = 2'-O-methyl modified nucleotide
  modified_base 33: mod_base = OTHER; note = 2'-O-methyl modified nucleotide
  misc_difference 34: note = 2'-O-methyl modified nucleotide may be trivalent N-acetylgalactosamine modified
nctcacagctgcctttcttaaggcagctgtgaga

SEQ ID NO: 1674 - RNA, 34 nt, synthetic construct
  source 1..34: mol_type = other RNA
  misc_difference 1: note = 2'-O-methyl modified nucleotide may be 5' phosphate modified
  modified_base 2: mod_base = OTHER; note = 2'-fluoro modified nucleotide
  modified_base 3: mod_base = OTHER; note = 2'-O-methyl modified nucleotide
  modified_base 4: mod_base = OTHER; note = 2'-O-methyl modified nucleotide
  modified_base 5: mod_base = OTHER; note = 2'-O-methyl modified nucleotide
  modified_base 6: mod_base = OTHER; note = 2'-O-methyl modified nucleotide
  modified_base 7: mod_base = OTHER; note = 2'-O-methyl modified nucleotide
  modified_base 8: mod_base = OTHER; note = 2'-O-methyl modified nucleotide
  modified_base 9: mod_base = OTHER; note = 2'-O-methyl modified nucleotide
  modified_base 10: mod_base = OTHER; note = 2'-O-methyl modified nucleotide
  modified_base 11: mod_base = OTHER; note = 2'-O-methyl modified nucleotide
  modified_base 12: mod_base = OTHER; note = 2'-O-methyl modified nucleotide
  modified_base 13: mod_base = OTHER; note = 2'-O-methyl modified nucleotide
  modified_base 14: mod_base = OTHER; note = 2'-fluoro modified nucleotide
  modified_base 15: mod_base = OTHER; note = 2'-O-methyl modified nucleotide
  modified_base 16: mod_base = OTHER; note = 2'-O-methyl modified nucleotide
  modified_base 17: mod_base = OTHER; note = 2'-O-methyl modified nucleotide
  modified_base 18: mod_base = OTHER; note = 2'-O-methyl modified nucleotide
  modified_base 19: mod_base = OTHER; note = 2'-O-methyl modified nucleotide
  modified_base 20: mod_base = OTHER; note = 2'-O-methyl modified nucleotide
  modified_base 21: mod_base = OTHER; note = 2'-O-methyl modified nucleotide
  modified_base 22: mod_base = OTHER; note = 2'-fluoro modified nucleotide
  modified_base 23: mod_base = OTHER; note = 2'-fluoro modified nucleotide
  modified_base 24: mod_base = OTHER; note = 2'-fluoro modified nucleotide
  modified_base 25: mod_base = OTHER; note = 2'-O-methyl modified nucleotide
  modified_base 26: mod_base = OTHER; note = 2'-O-methyl modified nucleotide
  modified_base 27: mod_base = OTHER; note = 2'-O-methyl modified nucleotide
  modified_base 28: mod_base = OTHER; note = 2'-O-methyl modified nucleotide
  modified_base 29: mod_base = OTHER; note = 2'-O-methyl modified nucleotide
  modified_base 30: mod_base = OTHER; note = 2'-O-methyl modified nucleotide
  modified_base 31: mod_base = OTHER; note = 2'-O-methyl modified nucleotide
  modified_base 32: mod_base = OTHER; note = 2'-O-methyl modified nucleotide
  modified_base 33: mod_base = OTHER; note = 2'-O-methyl modified nucleotide
  misc_difference 34: note = 2'-O-methyl modified nucleotide may be trivalent N-acetylgalactosamine modified
nccaatgctgtctgatccatcagacagcattgga

SEQ ID NO: 1675 - RNA, 34 nt, synthetic construct
  source 1..34: mol_type = other RNA
  misc_difference 1: note = 2'-O-methyl modified nucleotide may be 5' phosphate modified
  modified_base 2: mod_base = OTHER; note = 2'-fluoro modified nucleotide
  modified_base 3: mod_base = OTHER; note = 2'-O-methyl modified nucleotide
  modified_base 4: mod_base = OTHER; note = 2'-O-methyl modified nucleotide
  modified_base 5: mod_base = OTHER; note = 2'-O-methyl modified nucleotide
  modified_base 6: mod_base = OTHER; note = 2'-O-methyl modified nucleotide
  modified_base 7: mod_base = OTHER; note = 2'-O-methyl modified nucleotide
  modified_base 8: mod_base = OTHER; note = 2'-O-methyl modified nucleotide
  modified_base 9: mod_base = OTHER; note = 2'-O-methyl modified nucleotide
  modified_base 10: mod_base = OTHER; note = 2'-O-methyl modified nucleotide
  modified_base 11: mod_base = OTHER; note = 2'-O-methyl modified nucleotide
  modified_base 12: mod_base = OTHER; note = 2'-O-methyl modified nucleotide
  modified_base 13: mod_base = OTHER; note = 2'-O-methyl modified nucleotide
  modified_base 14: mod_base = OTHER; note = 2'-fluoro modified nucleotide
  modified_base 15: mod_base = OTHER; note = 2'-O-methyl modified nucleotide
  modified_base 16: mod_base = OTHER; note = 2'-O-methyl modified nucleotide
  modified_base 17: mod_base = OTHER; note = 2'-O-methyl modified nucleotide
  modified_base 18: mod_base = OTHER; note = 2'-O-methyl modified nucleotide
  modified_base 19: mod_base = OTHER; note = 2'-O-methyl modified nucleotide
  modified_base 20: mod_base = OTHER; note = 2'-O-methyl modified nucleotide
  modified_base 21: mod_base = OTHER; note = 2'-O-methyl modified nucleotide
  modified_base 22: mod_base = OTHER; note = 2'-fluoro modified nucleotide
  modified_base 23: mod_base = OTHER; note = 2'-fluoro modified nucleotide
  modified_base 24: mod_base = OTHER; note = 2'-fluoro modified nucleotide
  modified_base 25: mod_base = OTHER; note = 2'-O-methyl modified nucleotide
  modified_base 26: mod_base = OTHER; note = 2'-O-methyl modified nucleotide
  modified_base 27: mod_base = OTHER; note = 2'-O-methyl modified nucleotide
  modified_base 28: mod_base = OTHER; note = 2'-O-methyl modified nucleotide
  modified_base 29: mod_base = OTHER; note = 2'-O-methyl modified nucleotide
  modified_base 30: mod_base = OTHER; note = 2'-O-methyl modified nucleotide
  modified_base 31: mod_base = OTHER; note = 2'-O-methyl modified nucleotide
  modified_base 32: mod_base = OTHER; note = 2'-O-methyl modified nucleotide
  modified_base 33: mod_base = OTHER; note = 2'-O-methyl modified nucleotide
  misc_difference 34: note = 2'-O-methyl modified nucleotide may be trivalent N-acetylgalactosamine modified
ngagtggtggtcacacctctgtgaccaccactca

SEQ ID NO: 1676 - RNA, 34 nt, synthetic construct
  source 1..34: mol_type = other RNA
  misc_difference 1: note = 2'-O-methyl modified nucleotide may be 5' phosphate modified
  modified_base 2: mod_base = OTHER; note = 2'-fluoro modified nucleotide
  modified_base 3: mod_base = OTHER; note = 2'-O-methyl modified nucleotide
  modified_base 4: mod_base = OTHER; note = 2'-O-methyl modified nucleotide
  modified_base 5: mod_base = OTHER; note = 2'-O-methyl modified nucleotide
  modified_base 6: mod_base = OTHER; note = 2'-O-methyl modified nucleotide
  modified_base 7: mod_base = OTHER; note = 2'-O-methyl modified nucleotide
  modified_base 8: mod_base = OTHER; note = 2'-O-methyl modified nucleotide
  modified_base 9: mod_base = OTHER; note = 2'-O-methyl modified nucleotide
  modified_base 10: mod_base = OTHER; note = 2'-O-methyl modified nucleotide
  modified_base 11: mod_base = OTHER; note = 2'-O-methyl modified nucleotide
  modified_base 12: mod_base = OTHER; note = 2'-O-methyl modified nucleotide
  modified_base 13: mod_base = OTHER; note = 2'-O-methyl modified nucleotide
  modified_base 14: mod_base = OTHER; note = 2'-fluoro modified nucleotide
  modified_base 15: mod_base = OTHER; note = 2'-O-methyl modified nucleotide
  modified_base 16: mod_base = OTHER; note = 2'-O-methyl modified nucleotide
  modified_base 17: mod_base = OTHER; note = 2'-O-methyl modified nucleotide
  modified_base 18: mod_base = OTHER; note = 2'-O-methyl modified nucleotide
  modified_base 19: mod_base = OTHER; note = 2'-O-methyl modified nucleotide
  modified_base 20: mod_base = OTHER; note = 2'-O-methyl modified nucleotide
  modified_base 21: mod_base = OTHER; note = 2'-O-methyl modified nucleotide
  modified_base 22: mod_base = OTHER; note = 2'-fluoro modified nucleotide
  modified_base 23: mod_base = OTHER; note = 2'-fluoro modified nucleotide
  modified_base 24: mod_base = OTHER; note = 2'-fluoro modified nucleotide
  modified_base 25: mod_base = OTHER; note = 2'-O-methyl modified nucleotide
  modified_base 26: mod_base = OTHER; note = 2'-O-methyl modified nucleotide
  modified_base 27: mod_base = OTHER; note = 2'-O-methyl modified nucleotide
  modified_base 28: mod_base = OTHER; note = 2'-O-methyl modified nucleotide
  modified_base 29: mod_base = OTHER; note = 2'-O-methyl modified nucleotide
  modified_base 30: mod_base = OTHER; note = 2'-O-methyl modified nucleotide
  modified_base 31: mod_base = OTHER; note = 2'-O-methyl modified nucleotide
  modified_base 32: mod_base = OTHER; note = 2'-O-methyl modified nucleotide
  modified_base 33: mod_base = OTHER; note = 2'-O-methyl modified nucleotide
  misc_difference 34: note = 2'-O-methyl modified nucleotide may be trivalent N-acetylgalactosamine modified
natagggactcactcctccgagtgagtccctata

SEQ ID NO: 1677 - RNA, 34 nt, synthetic construct
  source 1..34: mol_type = other RNA
  misc_difference 1: note = 2'-O-methyl modified nucleotide may be 5' phosphate modified
  modified_base 2: mod_base = OTHER; note = 2'-fluoro modified nucleotide
  modified_base 3: mod_base = OTHER; note = 2'-O-methyl modified nucleotide
  modified_base 4: mod_base = OTHER; note = 2'-O-methyl modified nucleotide
  modified_base 5: mod_base = OTHER; note = 2'-O-methyl modified nucleotide
  modified_base 6: mod_base = OTHER; note = 2'-O-methyl modified nucleotide
  modified_base 7: mod_base = OTHER; note = 2'-O-methyl modified nucleotide
  modified_base 8: mod_base = OTHER; note = 2'-O-methyl modified nucleotide
  modified_base 9: mod_base = OTHER; note = 2'-O-methyl modified nucleotide
  modified_base 10: mod_base = OTHER; note = 2'-O-methyl modified nucleotide
  modified_base 11: mod_base = OTHER; note = 2'-O-methyl modified nucleotide
  modified_base 12: mod_base = OTHER; note = 2'-O-methyl modified nucleotide
  modified_base 13: mod_base = OTHER; note = 2'-O-methyl modified nucleotide
  modified_base 14: mod_base = OTHER; note = 2'-fluoro modified nucleotide
  modified_base 15: mod_base = OTHER; note = 2'-O-methyl modified nucleotide
  modified_base 16: mod_base = OTHER; note = 2'-O-methyl modified nucleotide
  modified_base 17: mod_base = OTHER; note = 2'-O-methyl modified nucleotide
  modified_base 18: mod_base = OTHER; note = 2'-O-methyl modified nucleotide
  modified_base 19: mod_base = OTHER; note = 2'-O-methyl modified nucleotide
  modified_base 20: mod_base = OTHER; note = 2'-O-methyl modified nucleotide
  modified_base 21: mod_base = OTHER; note = 2'-O-methyl modified nucleotide
  modified_base 22: mod_base = OTHER; note = 2'-fluoro modified nucleotide
  modified_base 23: mod_base = OTHER; note = 2'-fluoro modified nucleotide
  modified_base 24: mod_base = OTHER; note = 2'-fluoro modified nucleotide
  modified_base 25: mod_base = OTHER; note = 2'-O-methyl modified nucleotide
  modified_base 26: mod_base = OTHER; note = 2'-O-methyl modified nucleotide
  modified_base 27: mod_base = OTHER; note = 2'-O-methyl modified nucleotide
  modified_base 28: mod_base = OTHER; note = 2'-O-methyl modified nucleotide
  modified_base 29: mod_base = OTHER; note = 2'-O-methyl modified nucleotide
  modified_base 30: mod_base = OTHER; note = 2'-O-methyl modified nucleotide
  modified_base 31: mod_base = OTHER; note = 2'-O-methyl modified nucleotide
  modified_base 32: mod_base = OTHER; note = 2'-O-methyl modified nucleotide
  modified_base 33: mod_base = OTHER; note = 2'-O-methyl modified nucleotide
  misc_difference 34: note = 2'-O-methyl modified nucleotide may be trivalent N-acetylgalactosamine modified
nctgacttcaacttgtggtcaagttgaagtcaga

SEQ ID NO: 1678 - RNA, 34 nt, synthetic construct
  source 1..34: mol_type = other RNA
  misc_difference 1: note = 2'-O-methyl modified nucleotide may be 5' phosphate modified
  modified_base 2: mod_base = OTHER; note = 2'-fluoro modified nucleotide
  modified_base 3: mod_base = OTHER; note = 2'-O-methyl modified nucleotide
  modified_base 4: mod_base = OTHER; note = 2'-O-methyl modified nucleotide
  modified_base 5: mod_base = OTHER; note = 2'-O-methyl modified nucleotide
  modified_base 6: mod_base = OTHER; note = 2'-O-methyl modified nucleotide
  modified_base 7: mod_base = OTHER; note = 2'-O-methyl modified nucleotide
  modified_base 8: mod_base = OTHER; note = 2'-O-methyl modified nucleotide
  modified_base 9: mod_base = OTHER; note = 2'-O-methyl modified nucleotide
  modified_base 10: mod_base = OTHER; note = 2'-O-methyl modified nucleotide
  modified_base 11: mod_base = OTHER; note = 2'-O-methyl modified nucleotide
  modified_base 12: mod_base = OTHER; note = 2'-O-methyl modified nucleotide
  modified_base 13: mod_base = OTHER; note = 2'-O-methyl modified nucleotide
  modified_base 14: mod_base = OTHER; note = 2'-fluoro modified nucleotide
  modified_base 15: mod_base = OTHER; note = 2'-O-methyl modified nucleotide
  modified_base 16: mod_base = OTHER; note = 2'-O-methyl modified nucleotide
  modified_base 17: mod_base = OTHER; note = 2'-O-methyl modified nucleotide
  modified_base 18: mod_base = OTHER; note = 2'-O-methyl modified nucleotide
  modified_base 19: mod_base = OTHER; note = 2'-O-methyl modified nucleotide
  modified_base 20: mod_base = OTHER; note = 2'-O-methyl modified nucleotide
  modified_base 21: mod_base = OTHER; note = 2'-O-methyl modified nucleotide
  modified_base 22: mod_base = OTHER; note = 2'-fluoro modified nucleotide
  modified_base 23: mod_base = OTHER; note = 2'-fluoro modified nucleotide
  modified_base 24: mod_base = OTHER; note = 2'-fluoro modified nucleotide
  modified_base 25: mod_base = OTHER; note = 2'-O-methyl modified nucleotide
  modified_base 26: mod_base = OTHER; note = 2'-O-methyl modified nucleotide
  modified_base 27: mod_base = OTHER; note = 2'-O-methyl modified nucleotide
  modified_base 28: mod_base = OTHER; note = 2'-O-methyl modified nucleotide
  modified_base 29: mod_base = OTHER; note = 2'-O-methyl modified nucleotide
  modified_base 30: mod_base = OTHER; note = 2'-O-methyl modified nucleotide
  modified_base 31: mod_base = OTHER; note = 2'-O-methyl modified nucleotide
  modified_base 32: mod_base = OTHER; note = 2'-O-methyl modified nucleotide
  modified_base 33: mod_base = OTHER; note = 2'-O-methyl modified nucleotide
  misc_difference 34: note = 2'-O-methyl modified nucleotide may be trivalent N-acetylgalactosamine modified
nttctcaattaagttgactaacttaattgagaaa

SEQ ID NO: 1679 - RNA, 34 nt, synthetic construct
  source 1..34: mol_type = other RNA
  misc_difference 1: note = 2'-O-methyl modified nucleotide may be 5' phosphate modified
  modified_base 2: mod_base = OTHER; note = 2'-fluoro modified nucleotide
  modified_base 3: mod_base = OTHER; note = 2'-O-methyl modified nucleotide
  modified_base 4: mod_base = OTHER; note = 2'-O-methyl modified nucleotide
  modified_base 5: mod_base = OTHER; note = 2'-O-methyl modified nucleotide
  modified_base 6: mod_base = OTHER; note = 2'-O-methyl modified nucleotide
  modified_base 7: mod_base = OTHER; note = 2'-O-methyl modified nucleotide
  modified_base 8: mod_base = OTHER; note = 2'-O-methyl modified nucleotide
  modified_base 9: mod_base = OTHER; note = 2'-O-methyl modified nucleotide
  modified_base 10: mod_base = OTHER; note = 2'-O-methyl modified nucleotide
  modified_base 11: mod_base = OTHER; note = 2'-O-methyl modified nucleotide
  modified_base 12: mod_base = OTHER; note = 2'-O-methyl modified nucleotide
  modified_base 13: mod_base = OTHER; note = 2'-O-methyl modified nucleotide
  modified_base 14: mod_base = OTHER; note = 2'-fluoro modified nucleotide
  modified_base 15: mod_base = OTHER; note = 2'-O-methyl modified nucleotide
  modified_base 16: mod_base = OTHER; note = 2'-O-methyl modified nucleotide
  modified_base 17: mod_base = OTHER; note = 2'-O-methyl modified nucleotide
  modified_base 18: mod_base = OTHER; note = 2'-O-methyl modified nucleotide
  modified_base 19: mod_base = OTHER; note = 2'-O-methyl modified nucleotide
  modified_base 20: mod_base = OTHER; note = 2'-O-methyl modified nucleotide
  modified_base 21: mod_base = OTHER; note = 2'-O-methyl modified nucleotide
  modified_base 22: mod_base = OTHER; note = 2'-fluoro modified nucleotide
  modified_base 23: mod_base = OTHER; note = 2'-fluoro modified nucleotide
  modified_base 24: mod_base = OTHER; note = 2'-fluoro modified nucleotide
  modified_base 25: mod_base = OTHER; note = 2'-O-methyl modified nucleotide
  modified_base 26: mod_base = OTHER; note = 2'-O-methyl modified nucleotide
  modified_base 27: mod_base = OTHER; note = 2'-O-methyl modified nucleotide
  modified_base 28: mod_base = OTHER; note = 2'-O-methyl modified nucleotide
  modified_base 29: mod_base = OTHER; note = 2'-O-methyl modified nucleotide
  modified_base 30: mod_base = OTHER; note = 2'-O-methyl modified nucleotide
  modified_base 31: mod_base = OTHER; note = 2'-O-methyl modified nucleotide
  modified_base 32: mod_base = OTHER; note = 2'-O-methyl modified nucleotide
  modified_base 33: mod_base = OTHER; note = 2'-O-methyl modified nucleotide
  misc_difference 34: note = 2'-O-methyl modified nucleotide may be trivalent N-acetylgalactosamine modified
nagtttctccttcagccagctgaaggagaaacta

SEQ ID NO: 1680 - RNA, 34 nt, synthetic construct
  source 1..34: mol_type = other RNA
  misc_difference 1: note = 2'-O-methyl modified nucleotide may be 5' phosphate modified
  modified_base 2: mod_base = OTHER; note = 2'-fluoro modified nucleotide
  modified_base 3: mod_base = OTHER; note = 2'-O-methyl modified nucleotide
  modified_base 4: mod_base = OTHER; note = 2'-O-methyl modified nucleotide
  modified_base 5: mod_base = OTHER; note = 2'-O-methyl modified nucleotide
  modified_base 6: mod_base = OTHER; note = 2'-O-methyl modified nucleotide
  modified_base 7: mod_base = OTHER; note = 2'-O-methyl modified nucleotide
  modified_base 8: mod_base = OTHER; note = 2'-O-methyl modified nucleotide
  modified_base 9: mod_base = OTHER; note = 2'-O-methyl modified nucleotide
  modified_base 10: mod_base = OTHER; note = 2'-O-methyl modified nucleotide
  modified_base 11: mod_base = OTHER; note = 2'-O-methyl modified nucleotide
  modified_base 12: mod_base = OTHER; note = 2'-O-methyl modified nucleotide
  modified_base 13: mod_base = OTHER; note = 2'-O-methyl modified nucleotide
  modified_base 14: mod_base = OTHER; note = 2'-fluoro modified nucleotide
  modified_base 15: mod_base = OTHER; note = 2'-O-methyl modified nucleotide
  modified_base 16: mod_base = OTHER; note = 2'-O-methyl modified nucleotide
  modified_base 17: mod_base = OTHER; note = 2'-O-methyl modified nucleotide
  modified_base 18: mod_base = OTHER; note = 2'-O-methyl modified nucleotide
  modified_base 19: mod_base = OTHER; note = 2'-O-methyl modified nucleotide
  modified_base 20: mod_base = OTHER; note = 2'-O-methyl modified nucleotide
  modified_base 21: mod_base = OTHER; note = 2'-O-methyl modified nucleotide
  modified_base 22: mod_base = OTHER; note = 2'-fluoro modified nucleotide
  modified_base 23: mod_base = OTHER; note = 2'-fluoro modified nucleotide
  modified_base 24: mod_base = OTHER; note = 2'-fluoro modified nucleotide
  modified_base 25: mod_base = OTHER; note = 2'-O-methyl modified nucleotide
  modified_base 26: mod_base = OTHER; note = 2'-O-methyl modified nucleotide
  modified_base 27: mod_base = OTHER; note = 2'-O-methyl modified nucleotide
  modified_base 28: mod_base = OTHER; note = 2'-O-methyl modified nucleotide
  modified_base 29: mod_base = OTHER; note = 2'-O-methyl modified nucleotide
  modified_base 30: mod_base = OTHER; note = 2'-O-methyl modified nucleotide
  modified_base 31: mod_base = OTHER; note = 2'-O-methyl modified nucleotide
  modified_base 32: mod_base = OTHER; note = 2'-O-methyl modified nucleotide
  modified_base 33: mod_base = OTHER; note = 2'-O-methyl modified nucleotide
  misc_difference 34: note = 2'-O-methyl modified nucleotide may be trivalent N-acetylgalactosamine modified
nagctttgatatcctgtgcaggatatcaaagcta

SEQ ID NO: 1681 - RNA, 34 nt, synthetic construct
  source 1..34: mol_type = other RNA
  misc_difference 1: note = 2'-O-methyl modified nucleotide may be 5' phosphate modified
  modified_base 2: mod_base = OTHER; note = 2'-fluoro modified nucleotide
  modified_base 3: mod_base = OTHER; note = 2'-O-methyl modified nucleotide
  modified_base 4: mod_base = OTHER; note = 2'-O-methyl modified nucleotide
  modified_base 5: mod_base = OTHER; note = 2'-O-methyl modified nucleotide
  modified_base 6: mod_base = OTHER; note = 2'-O-methyl modified nucleotide
  modified_base 7: mod_base = OTHER; note = 2'-O-methyl modified nucleotide
  modified_base 8: mod_base = OTHER; note = 2'-O-methyl modified nucleotide
  modified_base 9: mod_base = OTHER; note = 2'-O-methyl modified nucleotide
  modified_base 10: mod_base = OTHER; note = 2'-O-methyl modified nucleotide
  modified_base 11: mod_base = OTHER; note = 2'-O-methyl modified nucleotide
  modified_base 12: mod_base = OTHER; note = 2'-O-methyl modified nucleotide
  modified_base 13: mod_base = OTHER; note = 2'-O-methyl modified nucleotide
  modified_base 14: mod_base = OTHER; note = 2'-fluoro modified nucleotide
  modified_base 15: mod_base = OTHER; note = 2'-O-methyl modified nucleotide
  modified_base 16: mod_base = OTHER; note = 2'-O-methyl modified nucleotide
  modified_base 17: mod_base = OTHER; note = 2'-O-methyl modified nucleotide
  modified_base 18: mod_base = OTHER; note = 2'-O-methyl modified nucleotide
  modified_base 19: mod_base = OTHER; note = 2'-O-methyl modified nucleotide
  modified_base 20: mod_base = OTHER; note = 2'-O-methyl modified nucleotide
  modified_base 21: mod_base = OTHER; note = 2'-O-methyl modified nucleotide
  modified_base 22: mod_base = OTHER; note = 2'-fluoro modified nucleotide
  modified_base 23: mod_base = OTHER; note = 2'-fluoro modified nucleotide
  modified_base 24: mod_base = OTHER; note = 2'-fluoro modified nucleotide
  modified_base 25: mod_base = OTHER; note = 2'-O-methyl modified nucleotide
  modified_base 26: mod_base = OTHER; note = 2'-O-methyl modified nucleotide
  modified_base 27: mod_base = OTHER; note = 2'-O-methyl modified nucleotide
  modified_base 28: mod_base = OTHER; note = 2'-O-methyl modified nucleotide
  modified_base 29: mod_base = OTHER; note = 2'-O-methyl modified nucleotide
  modified_base 30: mod_base = OTHER; note = 2'-O-methyl modified nucleotide
  modified_base 31: mod_base = OTHER; note = 2'-O-methyl modified nucleotide
  modified_base 32: mod_base = OTHER; note = 2'-O-methyl modified nucleotide
  modified_base 33: mod_base = OTHER; note = 2'-O-methyl modified nucleotide
  misc_difference 34: note = 2'-O-methyl modified nucleotide may be trivalent N-acetylgalactosamine modified
ntgtccttgactttgtcatcaaagtcaaggacaa

SEQ ID NO: 1682 - RNA, 34 nt, synthetic construct
  source 1..34: mol_type = other RNA
  misc_difference 1: note = 2'-O-methyl modified nucleotide may be 5' phosphate modified
  modified_base 2: mod_base = OTHER; note = 2'-fluoro modified nucleotide
  modified_base 3: mod_base = OTHER; note = 2'-O-methyl modified nucleotide
  modified_base 4: mod_base = OTHER; note = 2'-O-methyl modified nucleotide
  modified_base 5: mod_base = OTHER; note = 2'-O-methyl modified nucleotide
  modified_base 6: mod_base = OTHER; note = 2'-O-methyl modified nucleotide
  modified_base 7: mod_base = OTHER; note = 2'-O-methyl modified nucleotide
  modified_base 8: mod_base = OTHER; note = 2'-O-methyl modified nucleotide
  modified_base 9: mod_base = OTHER; note = 2'-O-methyl modified nucleotide
  modified_base 10: mod_base = OTHER; note = 2'-O-methyl modified nucleotide
  modified_base 11: mod_base = OTHER; note = 2'-O-methyl modified nucleotide
  modified_base 12: mod_base = OTHER; note = 2'-O-methyl modified nucleotide
  modified_base 13: mod_base = OTHER; note = 2'-O-methyl modified nucleotide
  modified_base 14: mod_base = OTHER; note = 2'-fluoro modified nucleotide
  modified_base 15: mod_base = OTHER; note = 2'-O-methyl modified nucleotide
  modified_base 16: mod_base = OTHER; note = 2'-O-methyl modified nucleotide
  modified_base 17: mod_base = OTHER; note = 2'-O-methyl modified nucleotide
  modified_base 18: mod_base = OTHER; note = 2'-O-methyl modified nucleotide
  modified_base 19: mod_base = OTHER; note = 2'-O-methyl modified nucleotide
  modified_base 20: mod_base = OTHER; note = 2'-O-methyl modified nucleotide
  modified_base 21: mod_base = OTHER; note = 2'-O-methyl modified nucleotide
  modified_base 22: mod_base = OTHER; note = 2'-fluoro modified nucleotide
  modified_base 23: mod_base = OTHER; note = 2'-fluoro modified nucleotide
  modified_base 24: mod_base = OTHER; note = 2'-fluoro modified nucleotide
  modified_base 25: mod_base = OTHER; note = 2'-O-methyl modified nucleotide
  modified_base 26: mod_base = OTHER; note = 2'-O-methyl modified nucleotide
  modified_base 27: mod_base = OTHER; note = 2'-O-methyl modified nucleotide
  modified_base 28: mod_base = OTHER; note = 2'-O-methyl modified nucleotide
  modified_base 29: mod_base = OTHER; note = 2'-O-methyl modified nucleotide
  modified_base 30: mod_base = OTHER; note = 2'-O-methyl modified nucleotide
  modified_base 31: mod_base = OTHER; note = 2'-O-methyl modified nucleotide
  modified_base 32: mod_base = OTHER; note = 2'-O-methyl modified nucleotide
  modified_base 33: mod_base = OTHER; note = 2'-O-methyl modified nucleotide
  misc_difference 34: note = 2'-O-methyl modified nucleotide may be trivalent N-acetylgalactosamine modified
ncaggtacgtgtctgcacacagacacgtacctga

SEQ ID NO: 1683 - RNA, 34 nt, synthetic construct
  source 1..34: mol_type = other RNA
  misc_difference 1: note = 2'-O-methyl modified nucleotide may be 5' phosphate modified
  modified_base 2: mod_base = OTHER; note = 2'-fluoro modified nucleotide
  modified_base 3: mod_base = OTHER; note = 2'-O-methyl modified nucleotide
  modified_base 4: mod_base = OTHER; note = 2'-O-methyl modified nucleotide
  modified_base 5: mod_base = OTHER; note = 2'-O-methyl modified nucleotide
  modified_base 6: mod_base = OTHER; note = 2'-O-methyl modified nucleotide
  modified_base 7: mod_base = OTHER; note = 2'-O-methyl modified nucleotide
  modified_base 8: mod_base = OTHER; note = 2'-O-methyl modified nucleotide
  modified_base 9: mod_base = OTHER; note = 2'-O-methyl modified nucleotide
  modified_base 10: mod_base = OTHER; note = 2'-O-methyl modified nucleotide
  modified_base 11: mod_base = OTHER; note = 2'-O-methyl modified nucleotide
  modified_base 12: mod_base = OTHER; note = 2'-O-methyl modified nucleotide
  modified_base 13: mod_base = OTHER; note = 2'-O-methyl modified nucleotide
  modified_base 14: mod_base = OTHER; note = 2'-fluoro modified nucleotide
  modified_base 15: mod_base = OTHER; note = 2'-O-methyl modified nucleotide
  modified_base 16: mod_base = OTHER; note = 2'-O-methyl modified nucleotide
  modified_base 17: mod_base = OTHER; note = 2'-O-methyl modified nucleotide
  modified_base 18: mod_base = OTHER; note = 2'-O-methyl modified nucleotide
  modified_base 19: mod_base = OTHER; note = 2'-O-methyl modified nucleotide
  modified_base 20: mod_base = OTHER; note = 2'-O-methyl modified nucleotide
  modified_base 21: mod_base = OTHER; note = 2'-O-methyl modified nucleotide
  modified_base 22: mod_base = OTHER; note = 2'-fluoro modified nucleotide
  modified_base 23: mod_base = OTHER; note = 2'-fluoro modified nucleotide
  modified_base 24: mod_base = OTHER; note = 2'-fluoro modified nucleotide
  modified_base 25: mod_base = OTHER; note = 2'-O-methyl modified nucleotide
  modified_base 26: mod_base = OTHER; note = 2'-O-methyl modified nucleotide
  modified_base 27: mod_base = OTHER; note = 2'-O-methyl modified nucleotide
  modified_base 28: mod_base = OTHER; note = 2'-O-methyl modified nucleotide
  modified_base 29: mod_base = OTHER; note = 2'-O-methyl modified nucleotide
  modified_base 30: mod_base = OTHER; note = 2'-O-methyl modified nucleotide
  modified_base 31: mod_base = OTHER; note = 2'-O-methyl modified nucleotide
  modified_base 32: mod_base = OTHER; note = 2'-O-methyl modified nucleotide
  modified_base 33: mod_base = OTHER; note = 2'-O-methyl modified nucleotide
  misc_difference 34: note = 2'-O-methyl modified nucleotide may be trivalent N-acetylgalactosamine modified
naaacaatgtgctgctgtcgcagcacattgttta

SEQ ID NO: 1684 - RNA, 34 nt, synthetic construct
  source 1..34: mol_type = other RNA
  misc_difference 1: note = 2'-O-methyl modified nucleotide may be 5' phosphate modified
  modified_base 2: mod_base = OTHER; note = 2'-fluoro modified nucleotide
  modified_base 3: mod_base = OTHER; note = 2'-O-methyl modified nucleotide
  modified_base 4: mod_base = OTHER; note = 2'-O-methyl modified nucleotide
  modified_base 5: mod_base = OTHER; note = 2'-O-methyl modified nucleotide
  modified_base 6: mod_base = OTHER; note = 2'-O-methyl modified nucleotide
  modified_base 7: mod_base = OTHER; note = 2'-O-methyl modified nucleotide
  modified_base 8: mod_base = OTHER; note = 2'-O-methyl modified nucleotide
  modified_base 9: mod_base = OTHER; note = 2'-O-methyl modified nucleotide
  modified_base 10: mod_base = OTHER; note = 2'-O-methyl modified nucleotide
  modified_base 11: mod_base = OTHER; note = 2'-O-methyl modified nucleotide
  modified_base 12: mod_base = OTHER; note = 2'-O-methyl modified nucleotide
  modified_base 13: mod_base = OTHER; note = 2'-O-methyl modified nucleotide
  modified_base 14: mod_base = OTHER; note = 2'-fluoro modified nucleotide
  modified_base 15: mod_base = OTHER; note = 2'-O-methyl modified nucleotide
  modified_base 16: mod_base = OTHER; note = 2'-O-methyl modified nucleotide
  modified_base 17: mod_base = OTHER; note = 2'-O-methyl modified nucleotide
  modified_base 18: mod_base = OTHER; note = 2'-O-methyl modified nucleotide
  modified_base 19: mod_base = OTHER; note = 2'-O-methyl modified nucleotide
  modified_base 20: mod_base = OTHER; note = 2'-O-methyl modified nucleotide
  modified_base 21: mod_base = OTHER; note = 2'-O-methyl modified nucleotide
  modified_base 22: mod_base = OTHER; note = 2'-fluoro modified nucleotide
  modified_base 23: mod_base = OTHER; note = 2'-fluoro modified nucleotide
  modified_base 24: mod_base = OTHER; note = 2'-fluoro modified nucleotide
  modified_base 25: mod_base = OTHER; note = 2'-O-methyl modified nucleotide
  modified_base 26: mod_base = OTHER; note = 2'-O-methyl modified nucleotide
  modified_base 27: mod_base = OTHER; note = 2'-O-methyl modified nucleotide
  modified_base 28: mod_base = OTHER; note = 2'-O-methyl modified nucleotide
  modified_base 29: mod_base = OTHER; note = 2'-O-methyl modified nucleotide
  modified_base 30: mod_base = OTHER; note = 2'-O-methyl modified nucleotide
  modified_base 31: mod_base = OTHER; note = 2'-O-methyl modified nucleotide
  modified_base 32: mod_base = OTHER; note = 2'-O-methyl modified nucleotide
  modified_base 33: mod_base = OTHER; note = 2'-O-methyl modified nucleotide
  misc_difference 34: note = 2'-O-methyl modified nucleotide may be trivalent N-acetylgalactosamine modified
natatcctgtgcagggagccctgcacaggatata

SEQ ID NO: 1685 - RNA, 34 nt, synthetic construct
  source 1..34: mol_type = other RNA
  misc_difference 1: note = 2'-O-methyl modified nucleotide may be 5' phosphate modified
  modified_base 2: mod_base = OTHER; note = 2'-fluoro modified nucleotide
  modified_base 3: mod_base = OTHER; note = 2'-O-methyl modified nucleotide
  modified_base 4: mod_base = OTHER; note = 2'-O-methyl modified nucleotide
  modified_base 5: mod_base = OTHER; note = 2'-O-methyl modified nucleotide
  modified_base 6: mod_base = OTHER; note = 2'-O-methyl modified nucleotide
  modified_base 7: mod_base = OTHER; note = 2'-O-methyl modified nucleotide
  modified_base 8: mod_base = OTHER; note = 2'-O-methyl modified nucleotide
  modified_base 9: mod_base = OTHER; note = 2'-O-methyl modified nucleotide
  modified_base 10: mod_base = OTHER; note = 2'-O-methyl modified nucleotide
  modified_base 11: mod_base = OTHER; note = 2'-O-methyl modified nucleotide
  modified_base 12: mod_base = OTHER; note = 2'-O-methyl modified nucleotide
  modified_base 13: mod_base = OTHER; note = 2'-O-methyl modified nucleotide
  modified_base 14: mod_base = OTHER; note = 2'-fluoro modified nucleotide
  modified_base 15: mod_base = OTHER; note = 2'-O-methyl modified nucleotide
  modified_base 16: mod_base = OTHER; note = 2'-O-methyl modified nucleotide
  modified_base 17: mod_base = OTHER; note = 2'-O-methyl modified nucleotide
  modified_base 18: mod_base = OTHER; note = 2'-O-methyl modified nucleotide
  modified_base 19: mod_base = OTHER; note = 2'-O-methyl modified nucleotide
  modified_base 20: mod_base = OTHER; note = 2'-O-methyl modified nucleotide
  modified_base 21: mod_base = OTHER; note = 2'-O-methyl modified nucleotide
  modified_base 22: mod_base = OTHER; note = 2'-fluoro modified nucleotide
  modified_base 23: mod_base = OTHER; note = 2'-fluoro modified nucleotide
  modified_base 24: mod_base = OTHER; note = 2'-fluoro modified nucleotide
  modified_base 25: mod_base = OTHER; note = 2'-O-methyl modified nucleotide
  modified_base 26: mod_base = OTHER; note = 2'-O-methyl modified nucleotide
  modified_base 27: mod_base = OTHER; note = 2'-O-methyl modified nucleotide
  modified_base 28: mod_base = OTHER; note = 2'-O-methyl modified nucleotide
  modified_base 29: mod_base = OTHER; note = 2'-O-methyl modified nucleotide
  modified_base 30: mod_base = OTHER; note = 2'-O-methyl modified nucleotide
  modified_base 31: mod_base = OTHER; note = 2'-O-methyl modified nucleotide
  modified_base 32: mod_base = OTHER; note = 2'-O-methyl modified nucleotide
  modified_base 33: mod_base = OTHER; note = 2'-O-methyl modified nucleotide
  misc_difference 34: note = 2'-O-methyl modified nucleotide may be trivalent N-acetylgalactosamine modified
ngactcagagactggctttccagtctctgagtca

SEQ ID NO: 1686 - RNA, 34 nt, synthetic construct
  source 1..34: mol_type = other RNA
  misc_difference 1: note = 2'-O-methyl modified nucleotide may be 5' phosphate modified
  modified_base 2: mod_base = OTHER; note = 2'-fluoro modified nucleotide
  modified_base 3: mod_base = OTHER; note = 2'-O-methyl modified nucleotide
  modified_base 4: mod_base = OTHER; note = 2'-O-methyl modified nucleotide
  modified_base 5: mod_base = OTHER; note = 2'-O-methyl modified nucleotide
  modified_base 6: mod_base = OTHER; note = 2'-O-methyl modified nucleotide
  modified_base 7: mod_base = OTHER; note = 2'-O-methyl modified nucleotide
  modified_base 8: mod_base = OTHER; note = 2'-O-methyl modified nucleotide
  modified_base 9: mod_base = OTHER; note = 2'-O-methyl modified nucleotide
  modified_base 10: mod_base = OTHER; note = 2'-O-methyl modified nucleotide
  modified_base 11: mod_base = OTHER; note = 2'-O-methyl modified nucleotide
  modified_base 12: mod_base = OTHER; note = 2'-O-methyl modified nucleotide
  modified_base 13: mod_base = OTHER; note = 2'-O-methyl modified nucleotide
  modified_base 14: mod_base = OTHER; note = 2'-fluoro modified nucleotide
  modified_base 15: mod_base = OTHER; note = 2'-O-methyl modified nucleotide
  modified_base 16: mod_base = OTHER; note = 2'-O-methyl modified nucleotide
  modified_base 17: mod_base = OTHER; note = 2'-O-methyl modified nucleotide
  modified_base 18: mod_base = OTHER; note = 2'-O-methyl modified nucleotide
  modified_base 19: mod_base = OTHER; note = 2'-O-methyl modified nucleotide
  modified_base 20: mod_base = OTHER; note = 2'-O-methyl modified nucleotide
  modified_base 21: mod_base = OTHER; note = 2'-O-methyl modified nucleotide
  modified_base 22: mod_base = OTHER; note = 2'-fluoro modified nucleotide
  modified_base 23: mod_base = OTHER; note = 2'-fluoro modified nucleotide
  modified_base 24: mod_base = OTHER; note = 2'-fluoro modified nucleotide
  modified_base 25: mod_base = OTHER; note = 2'-O-methyl modified nucleotide
  modified_base 26: mod_base = OTHER; note = 2'-O-methyl modified nucleotide
  modified_base 27: mod_base = OTHER; note = 2'-O-methyl modified nucleotide
  modified_base 28: mod_base = OTHER; note = 2'-O-methyl modified nucleotide
  modified_base 29: mod_base = OTHER; note = 2'-O-methyl modified nucleotide
  modified_base 30: mod_base = OTHER; note = 2'-O-methyl modified nucleotide
  modified_base 31: mod_base = OTHER; note = 2'-O-methyl modified nucleotide
  modified_base 32: mod_base = OTHER; note = 2'-O-methyl modified nucleotide
  modified_base 33: mod_base = OTHER; note = 2'-O-methyl modified nucleotide
  misc_difference 34: note = 2'-O-methyl modified nucleotide may be trivalent N-acetylgalactosamine modified
ncaatgacagtaattgggtaattactgtcattga

SEQ ID NO: 1687 - RNA, 34 nt, synthetic construct
  source 1..34: mol_type = other RNA
  misc_difference 1: note = 2'-O-methyl modified nucleotide may be 5' phosphate modified
  modified_base 2: mod_base = OTHER; note = 2'-fluoro modified nucleotide
  modified_base 3: mod_base = OTHER; note = 2'-O-methyl modified nucleotide
  modified_base 4: mod_base = OTHER; note = 2'-O-methyl modified nucleotide
  modified_base 5: mod_base = OTHER; note = 2'-O-methyl modified nucleotide
  modified_base 6: mod_base = OTHER; note = 2'-O-methyl modified nucleotide
  modified_base 7: mod_base = OTHER; note = 2'-O-methyl modified nucleotide
  modified_base 8: mod_base = OTHER; note = 2'-O-methyl modified nucleotide
  modified_base 9: mod_base = OTHER; note = 2'-O-methyl modified nucleotide
  modified_base 10: mod_base = OTHER; note = 2'-O-methyl modified nucleotide
  modified_base 11: mod_base = OTHER; note = 2'-O-methyl modified nucleotide
  modified_base 12: mod_base = OTHER; note = 2'-O-methyl modified nucleotide
  modified_base 13: mod_base = OTHER; note = 2'-O-methyl modified nucleotide
  modified_base 14: mod_base = OTHER; note = 2'-fluoro modified nucleotide
  modified_base 15: mod_base = OTHER; note = 2'-O-methyl modified nucleotide
  modified_base 16: mod_base = OTHER; note = 2'-O-methyl modified nucleotide
  modified_base 17: mod_base = OTHER; note = 2'-O-methyl modified nucleotide
  modified_base 18: mod_base = OTHER; note = 2'-O-methyl modified nucleotide
  modified_base 19: mod_base = OTHER; note = 2'-O-methyl modified nucleotide
  modified_base 20: mod_base = OTHER; note = 2'-O-methyl modified nucleotide
  modified_base 21: mod_base = OTHER; note = 2'-O-methyl modified nucleotide
  modified_base 22: mod_base = OTHER; note = 2'-fluoro modified nucleotide
  modified_base 23: mod_base = OTHER; note = 2'-fluoro modified nucleotide
  modified_base 24: mod_base = OTHER; note = 2'-fluoro modified nucleotide
  modified_base 25: mod_base = OTHER; note = 2'-O-methyl modified nucleotide
  modified_base 26: mod_base = OTHER; note = 2'-O-methyl modified nucleotide
  modified_base 27: mod_base = OTHER; note = 2'-O-methyl modified nucleotide
  modified_base 28: mod_base = OTHER; note = 2'-O-methyl modified nucleotide
  modified_base 29: mod_base = OTHER; note = 2'-O-methyl modified nucleotide
  modified_base 30: mod_base = OTHER; note = 2'-O-methyl modified nucleotide
  modified_base 31: mod_base = OTHER; note = 2'-O-methyl modified nucleotide
  modified_base 32: mod_base = OTHER; note = 2'-O-methyl modified nucleotide
  modified_base 33: mod_base = OTHER; note = 2'-O-methyl modified nucleotide
  misc_difference 34: note = 2'-O-methyl modified nucleotide may be trivalent N-acetylgalactosamine modified
ngagccaccttcctgacaccaggaaggtggctca

SEQ ID NO: 1688 - RNA, 34 nt, synthetic construct
  source 1..34: mol_type = other RNA
  misc_difference 1: note = 2'-O-methyl modified nucleotide may be 5' phosphate modified
  modified_base 2: mod_base = OTHER; note = 2'-fluoro modified nucleotide
  modified_base 3: mod_base = OTHER; note = 2'-O-methyl modified nucleotide
  modified_base 4: mod_base = OTHER; note = 2'-O-methyl modified nucleotide
  modified_base 5: mod_base = OTHER; note = 2'-O-methyl modified nucleotide
  modified_base 6: mod_base = OTHER; note = 2'-O-methyl modified nucleotide
  modified_base 7: mod_base = OTHER; note = 2'-O-methyl modified nucleotide
  modified_base 8: mod_base = OTHER; note = 2'-O-methyl modified nucleotide
  modified_base 9: mod_base = OTHER; note = 2'-O-methyl modified nucleotide
  modified_base 10: mod_base = OTHER; note = 2'-O-methyl modified nucleotide
  modified_base 11: mod_base = OTHER; note = 2'-O-methyl modified nucleotide
  modified_base 12: mod_base = OTHER; note = 2'-O-methyl modified nucleotide
  modified_base 13: mod_base = OTHER; note = 2'-O-methyl modified nucleotide
  modified_base 14: mod_base = OTHER; note = 2'-fluoro modified nucleotide
  modified_base 15: mod_base = OTHER; note = 2'-O-methyl modified nucleotide
  modified_base 16: mod_base = OTHER; note = 2'-O-methyl modified nucleotide
  modified_base 17: mod_base = OTHER; note = 2'-O-methyl modified nucleotide
  modified_base 18: mod_base = OTHER; note = 2'-O-methyl modified nucleotide
  modified_base 19: mod_base = OTHER; note = 2'-O-methyl modified nucleotide
  modified_base 20: mod_base = OTHER; note = 2'-O-methyl modified nucleotide
  modified_base 21: mod_base = OTHER; note = 2'-O-methyl modified nucleotide
  modified_base 22: mod_base = OTHER; note = 2'-fluoro modified nucleotide
  modified_base 23: mod_base = OTHER; note = 2'-fluoro modified nucleotide
  modified_base 24: mod_base = OTHER; note = 2'-fluoro modified nucleotide
  modified_base 25: mod_base = OTHER; note = 2'-O-methyl modified nucleotide
  modified_base 26: mod_base = OTHER; note = 2'-O-methyl modified nucleotide
  modified_base 27: mod_base = OTHER; note = 2'-O-methyl modified nucleotide
  modified_base 28: mod_base = OTHER; note = 2'-O-methyl modified nucleotide
  modified_base 29: mod_base = OTHER; note = 2'-O-methyl modified nucleotide
  modified_base 30: mod_base = OTHER; note = 2'-O-methyl modified nucleotide
  modified_base 31: mod_base = OTHER; note = 2'-O-methyl modified nucleotide
  modified_base 32: mod_base = OTHER; note = 2'-O-methyl modified nucleotide
  modified_base 33: mod_base = OTHER; note = 2'-O-methyl modified nucleotide
  misc_difference 34: note = 2'-O-methyl modified nucleotide may be trivalent N-acetylgalactosamine modified
ncttgactttgaacacatgtgttcaaagtcaaga

SEQ ID NO: 1689 - RNA, 34 nt, synthetic construct
  source 1..34: mol_type = other RNA
  misc_difference 1: note = 2'-O-methyl modified nucleotide may be 5' phosphate modified
  modified_base 2: mod_base = OTHER; note = 2'-fluoro modified nucleotide
  modified_base 3: mod_base = OTHER; note = 2'-O-methyl modified nucleotide
  modified_base 4: mod_base = OTHER; note = 2'-O-methyl modified nucleotide
  modified_base 5: mod_base = OTHER; note = 2'-O-methyl modified nucleotide
  modified_base 6: mod_base = OTHER; note = 2'-O-methyl modified nucleotide
  modified_base 7: mod_base = OTHER; note = 2'-O-methyl modified nucleotide
  modified_base 8: mod_base = OTHER; note = 2'-O-methyl modified nucleotide
  modified_base 9: mod_base = OTHER; note = 2'-O-methyl modified nucleotide
  modified_base 10: mod_base = OTHER; note = 2'-O-methyl modified nucleotide
  modified_base 11: mod_base = OTHER; note = 2'-O-methyl modified nucleotide
  modified_base 12: mod_base = OTHER; note = 2'-O-methyl modified nucleotide
  modified_base 13: mod_base = OTHER; note = 2'-O-methyl modified nucleotide
  modified_base 14: mod_base = OTHER; note = 2'-fluoro modified nucleotide
  modified_base 15: mod_base = OTHER; note = 2'-O-methyl modified nucleotide
  modified_base 16: mod_base = OTHER; note = 2'-O-methyl modified nucleotide
  modified_base 17: mod_base = OTHER; note = 2'-O-methyl modified nucleotide
  modified_base 18: mod_base = OTHER; note = 2'-O-methyl modified nucleotide
  modified_base 19: mod_base = OTHER; note = 2'-O-methyl modified nucleotide
  modified_base 20: mod_base = OTHER; note = 2'-O-methyl modified nucleotide
  modified_base 21: mod_base = OTHER; note = 2'-O-methyl modified nucleotide
  modified_base 22: mod_base = OTHER; note = 2'-fluoro modified nucleotide
  modified_base 23: mod_base = OTHER; note = 2'-fluoro modified nucleotide
  modified_base 24: mod_base = OTHER; note = 2'-fluoro modified nucleotide
  modified_base 25: mod_base = OTHER; note = 2'-O-methyl modified nucleotide
  modified_base 26: mod_base = OTHER; note = 2'-O-methyl modified nucleotide
  modified_base 27: mod_base = OTHER; note = 2'-O-methyl modified nucleotide
  modified_base 28: mod_base = OTHER; note = 2'-O-methyl modified nucleotide
  modified_base 29: mod_base = OTHER; note = 2'-O-methyl modified nucleotide
  modified_base 30: mod_base = OTHER; note = 2'-O-methyl modified nucleotide
  modified_base 31: mod_base = OTHER; note = 2'-O-methyl modified nucleotide
  modified_base 32: mod_base = OTHER; note = 2'-O-methyl modified nucleotide
  modified_base 33: mod_base = OTHER; note = 2'-O-methyl modified nucleotide
  misc_difference 34: note = 2'-O-methyl modified nucleotide may be trivalent N-acetylgalactosamine modified
natgaaacgacttctcttgagaagtcgtttcata

SEQ ID NO: 1690 - RNA, 34 nt, synthetic construct
  source 1..34: mol_type = other RNA
  misc_difference 1: note = 2'-O-methyl modified nucleotide may be 5' phosphate modified
  modified_base 2: mod_base = OTHER; note = 2'-fluoro modified nucleotide
  modified_base 3: mod_base = OTHER; note = 2'-O-methyl modified nucleotide
  modified_base 4: mod_base = OTHER; note = 2'-O-methyl modified nucleotide
  modified_base 5: mod_base = OTHER; note = 2'-O-methyl modified nucleotide
  modified_base 6: mod_base = OTHER; note = 2'-O-methyl modified nucleotide
  modified_base 7: mod_base = OTHER; note = 2'-O-methyl modified nucleotide
  modified_base 8: mod_base = OTHER; note = 2'-O-methyl modified nucleotide
  modified_base 9: mod_base = OTHER; note = 2'-O-methyl modified nucleotide
  modified_base 10: mod_base = OTHER; note = 2'-O-methyl modified nucleotide
  modified_base 11: mod_base = OTHER; note = 2'-O-methyl modified nucleotide
  modified_base 12: mod_base = OTHER; note = 2'-O-methyl modified nucleotide
  modified_base 13: mod_base = OTHER; note = 2'-O-methyl modified nucleotide
  modified_base 14: mod_base = OTHER; note = 2'-fluoro modified nucleotide
  modified_base 15: mod_base = OTHER; note = 2'-O-methyl modified nucleotide
  modified_base 16: mod_base = OTHER; note = 2'-O-methyl modified nucleotide
  modified_base 17: mod_base = OTHER; note = 2'-O-methyl modified nucleotide
  modified_base 18: mod_base = OTHER; note = 2'-O-methyl modified nucleotide
  modified_base 19: mod_base = OTHER; note = 2'-O-methyl modified nucleotide
  modified_base 20: mod_base = OTHER; note = 2'-O-methyl modified nucleotide
  modified_base 21: mod_base = OTHER; note = 2'-O-methyl modified nucleotide
  modified_base 22: mod_base = OTHER; note = 2'-fluoro modified nucleotide
  modified_base 23: mod_base = OTHER; note = 2'-fluoro modified nucleotide
  modified_base 24: mod_base = OTHER; note = 2'-fluoro modified nucleotide
  modified_base 25: mod_base = OTHER; note = 2'-O-methyl modified nucleotide
  modified_base 26: mod_base = OTHER; note = 2'-O-methyl modified nucleotide
  modified_base 27: mod_base = OTHER; note = 2'-O-methyl modified nucleotide
  modified_base 28: mod_base = OTHER; note = 2'-O-methyl modified nucleotide
  modified_base 29: mod_base = OTHER; note = 2'-O-methyl modified nucleotide
  modified_base 30: mod_base = OTHER; note = 2'-O-methyl modified nucleotide
  modified_base 31: mod_base = OTHER; note = 2'-O-methyl modified nucleotide
  modified_base 32: mod_base = OTHER; note = 2'-O-methyl modified nucleotide
  modified_base 33: mod_base = OTHER; note = 2'-O-methyl modified nucleotide
  misc_difference 34: note = 2'-O-methyl modified nucleotide may be trivalent N-acetylgalactosamine modified
ngaagacaggaaagcttcggctttcctgtcttca

SEQ ID NO: 1691 - RNA, 34 nt, synthetic construct
  source 1..34: mol_type = other RNA
  misc_difference 1: note = 2'-O-methyl modified nucleotide may be 5' phosphate modified
  modified_base 2: mod_base = OTHER; note = 2'-fluoro modified nucleotide
  modified_base 3: mod_base = OTHER; note = 2'-O-methyl modified nucleotide
  modified_base 4: mod_base = OTHER; note = 2'-O-methyl modified nucleotide
  modified_base 5: mod_base = OTHER; note = 2'-O-methyl modified nucleotide
  modified_base 6: mod_base = OTHER; note = 2'-O-methyl modified nucleotide
  modified_base 7: mod_base = OTHER; note = 2'-O-methyl modified nucleotide
  modified_base 8: mod_base = OTHER; note = 2'-O-methyl modified nucleotide
  modified_base 9: mod_base = OTHER; note = 2'-O-methyl modified nucleotide
  modified_base 10: mod_base = OTHER; note = 2'-O-methyl modified nucleotide
  modified_base 11: mod_base = OTHER; note = 2'-O-methyl modified nucleotide
  modified_base 12: mod_base = OTHER; note = 2'-O-methyl modified nucleotide
  modified_base 13: mod_base = OTHER; note = 2'-O-methyl modified nucleotide
  modified_base 14: mod_base = OTHER; note = 2'-fluoro modified nucleotide
  modified_base 15: mod_base = OTHER; note = 2'-O-methyl modified nucleotide
  modified_base 16: mod_base = OTHER; note = 2'-O-methyl modified nucleotide
  modified_base 17: mod_base = OTHER; note = 2'-O-methyl modified nucleotide
  modified_base 18: mod_base = OTHER; note = 2'-O-methyl modified nucleotide
  modified_base 19: mod_base = OTHER; note = 2'-O-methyl modified nucleotide
  modified_base 20: mod_base = OTHER; note = 2'-O-methyl modified nucleotide
  modified_base 21: mod_base = OTHER; note = 2'-O-methyl modified nucleotide
  modified_base 22: mod_base = OTHER; note = 2'-fluoro modified nucleotide
  modified_base 23: mod_base = OTHER; note = 2'-fluoro modified nucleotide
  modified_base 24: mod_base = OTHER; note = 2'-fluoro modified nucleotide
  modified_base 25: mod_base = OTHER; note = 2'-O-methyl modified nucleotide
  modified_base 26: mod_base = OTHER; note = 2'-O-methyl modified nucleotide
  modified_base 27: mod_base = OTHER; note = 2'-O-methyl modified nucleotide
  modified_base 28: mod_base = OTHER; note = 2'-O-methyl modified nucleotide
  modified_base 29: mod_base = OTHER; note = 2'-O-methyl modified nucleotide
  modified_base 30: mod_base = OTHER; note = 2'-O-methyl modified nucleotide
  modified_base 31: mod_base = OTHER; note = 2'-O-methyl modified nucleotide
  modified_base 32: mod_base = OTHER; note = 2'-O-methyl modified nucleotide
  modified_base 33: mod_base = OTHER; note = 2'-O-methyl modified nucleotide
  misc_difference 34: note = 2'-O-methyl modified nucleotide may be trivalent N-acetylgalactosamine modified
ngctttgatatcctgtgcacaggatatcaaagca

SEQ ID NO: 1692 - RNA, 34 nt, synthetic construct
  source 1..34: mol_type = other RNA
  misc_difference 1: note = 2'-O-methyl modified nucleotide may be 5' phosphate modified
  modified_base 2: mod_base = OTHER; note = 2'-fluoro modified nucleotide
  modified_base 3: mod_base = OTHER; note = 2'-O-methyl modified nucleotide
  modified_base 4: mod_base = OTHER; note = 2'-O-methyl modified nucleotide
  modified_base 5: mod_base = OTHER; note = 2'-O-methyl modified nucleotide
  modified_base 6: mod_base = OTHER; note = 2'-O-methyl modified nucleotide
  modified_base 7: mod_base = OTHER; note = 2'-O-methyl modified nucleotide
  modified_base 8: mod_base = OTHER; note = 2'-O-methyl modified nucleotide
  modified_base 9: mod_base = OTHER; note = 2'-O-methyl modified nucleotide
  modified_base 10: mod_base = OTHER; note = 2'-O-methyl modified nucleotide
  modified_base 11: mod_base = OTHER; note = 2'-O-methyl modified nucleotide
  modified_base 12: mod_base = OTHER; note = 2'-O-methyl modified nucleotide
  modified_base 13: mod_base = OTHER; note = 2'-O-methyl modified nucleotide
  modified_base 14: mod_base = OTHER; note = 2'-fluoro modified nucleotide
  modified_base 15: mod_base = OTHER; note = 2'-O-methyl modified nucleotide
  modified_base 16: mod_base = OTHER; note = 2'-O-methyl modified nucleotide
  modified_base 17: mod_base = OTHER; note = 2'-O-methyl modified nucleotide
  modified_base 18: mod_base = OTHER; note = 2'-O-methyl modified nucleotide
  modified_base 19: mod_base = OTHER; note = 2'-O-methyl modified nucleotide
  modified_base 20: mod_base = OTHER; note = 2'-O-methyl modified nucleotide
  modified_base 21: mod_base = OTHER; note = 2'-O-methyl modified nucleotide
  modified_base 22: mod_base = OTHER; note = 2'-fluoro modified nucleotide
  modified_base 23: mod_base = OTHER; note = 2'-fluoro modified nucleotide
  modified_base 24: mod_base = OTHER; note = 2'-fluoro modified nucleotide
  modified_base 25: mod_base = OTHER; note = 2'-O-methyl modified nucleotide
  modified_base 26: mod_base = OTHER; note = 2'-O-methyl modified nucleotide
  modified_base 27: mod_base = OTHER; note = 2'-O-methyl modified nucleotide
  modified_base 28: mod_base = OTHER; note = 2'-O-methyl modified nucleotide
  modified_base 29: mod_base = OTHER; note = 2'-O-methyl modified nucleotide
  modified_base 30: mod_base = OTHER; note = 2'-O-methyl modified nucleotide
  modified_base 31: mod_base = OTHER; note = 2'-O-methyl modified nucleotide
  modified_base 32: mod_base = OTHER; note = 2'-O-methyl modified nucleotide
  modified_base 33: mod_base = OTHER; note = 2'-O-methyl modified nucleotide
  misc_difference 34: note = 2'-O-methyl modified nucleotide may be trivalent N-acetylgalactosamine modified
ntcttgagcttgatcaggggatcaagctcaagaa

SEQ ID NO: 1693 - RNA, 34 nt, synthetic construct
  source 1..34: mol_type = other RNA
  misc_difference 1: note = 2'-O-methyl modified nucleotide may be 5' phosphate modified
  modified_base 2: mod_base = OTHER; note = 2'-fluoro modified nucleotide
  modified_base 3: mod_base = OTHER; note = 2'-O-methyl modified nucleotide
  modified_base 4: mod_base = OTHER; note = 2'-O-methyl modified nucleotide
  modified_base 5: mod_base = OTHER; note = 2'-O-methyl modified nucleotide
  modified_base 6: mod_base = OTHER; note = 2'-O-methyl modified nucleotide
  modified_base 7: mod_base = OTHER; note = 2'-O-methyl modified nucleotide
  modified_base 8: mod_base = OTHER; note = 2'-O-methyl modified nucleotide
  modified_base 9: mod_base = OTHER; note = 2'-O-methyl modified nucleotide
  modified_base 10: mod_base = OTHER; note = 2'-O-methyl modified nucleotide
  modified_base 11: mod_base = OTHER; note = 2'-O-methyl modified nucleotide
  modified_base 12: mod_base = OTHER; note = 2'-O-methyl modified nucleotide
  modified_base 13: mod_base = OTHER; note = 2'-O-methyl modified nucleotide
  modified_base 14: mod_base = OTHER; note = 2'-fluoro modified nucleotide
  modified_base 15: mod_base = OTHER; note = 2'-O-methyl modified nucleotide
  modified_base 16: mod_base = OTHER; note = 2'-O-methyl modified nucleotide
  modified_base 17: mod_base = OTHER; note = 2'-O-methyl modified nucleotide
  modified_base 18: mod_base = OTHER; note = 2'-O-methyl modified nucleotide
  modified_base 19: mod_base = OTHER; note = 2'-O-methyl modified nucleotide
  modified_base 20: mod_base = OTHER; note = 2'-O-methyl modified nucleotide
  modified_base 21: mod_base = OTHER; note = 2'-O-methyl modified nucleotide
  modified_base 22: mod_base = OTHER; note = 2'-fluoro modified nucleotide
  modified_base 23: mod_base = OTHER; note = 2'-fluoro modified nucleotide
  modified_base 24: mod_base = OTHER; note = 2'-fluoro modified nucleotide
  modified_base 25: mod_base = OTHER; note = 2'-O-methyl modified nucleotide
  modified_base 26: mod_base = OTHER; note = 2'-O-methyl modified nucleotide
  modified_base 27: mod_base = OTHER; note = 2'-O-methyl modified nucleotide
  modified_base 28: mod_base = OTHER; note = 2'-O-methyl modified nucleotide
  modified_base 29: mod_base = OTHER; note = 2'-O-methyl modified nucleotide
  modified_base 30: mod_base = OTHER; note = 2'-O-methyl modified nucleotide
  modified_base 31: mod_base = OTHER; note = 2'-O-methyl modified nucleotide
  modified_base 32: mod_base = OTHER; note = 2'-O-methyl modified nucleotide
  modified_base 33: mod_base = OTHER; note = 2'-O-methyl modified nucleotide
  misc_difference 34: note = 2'-O-methyl modified nucleotide may be trivalent N-acetylgalactosamine modified
nggattgctctgcactctggtgcagagcaatcca

SEQ ID NO: 1694 - RNA, 34 nt, synthetic construct
  source 1..34: mol_type = other RNA
  misc_difference 1: note = 2'-O-methyl modified nucleotide may be 5' phosphate modified
  modified_base 2: mod_base = OTHER; note = 2'-fluoro modified nucleotide
  modified_base 3: mod_base = OTHER; note = 2'-O-methyl modified nucleotide
  modified_base 4: mod_base = OTHER; note = 2'-O-methyl modified nucleotide
  modified_base 5: mod_base = OTHER; note = 2'-O-methyl modified nucleotide
  modified_base 6: mod_base = OTHER; note = 2'-O-methyl modified nucleotide
  modified_base 7: mod_base = OTHER; note = 2'-O-methyl modified nucleotide
  modified_base 8: mod_base = OTHER; note = 2'-O-methyl modified nucleotide
  modified_base 9: mod_base = OTHER; note = 2'-O-methyl modified nucleotide
  modified_base 10: mod_base = OTHER; note = 2'-O-methyl modified nucleotide
  modified_base 11: mod_base = OTHER; note = 2'-O-methyl modified nucleotide
  modified_base 12: mod_base = OTHER; note = 2'-O-methyl modified nucleotide
  modified_base 13: mod_base = OTHER; note = 2'-O-methyl modified nucleotide
  modified_base 14: mod_base = OTHER; note = 2'-fluoro modified nucleotide
  modified_base 15: mod_base = OTHER; note = 2'-O-methyl modified nucleotide
  modified_base 16: mod_base = OTHER; note = 2'-O-methyl modified nucleotide
  modified_base 17: mod_base = OTHER; note = 2'-O-methyl modified nucleotide
  modified_base 18: mod_base = OTHER; note = 2'-O-methyl modified nucleotide
  modified_base 19: mod_base = OTHER; note = 2'-O-methyl modified nucleotide
  modified_base 20: mod_base = OTHER; note = 2'-O-methyl modified nucleotide
  modified_base 21: mod_base = OTHER; note = 2'-O-methyl modified nucleotide
  modified_base 22: mod_base = OTHER; note = 2'-fluoro modified nucleotide
  modified_base 23: mod_base = OTHER; note = 2'-fluoro modified nucleotide
  modified_base 24: mod_base = OTHER; note = 2'-fluoro modified nucleotide
  modified_base 25: mod_base = OTHER; note = 2'-O-methyl modified nucleotide
  modified_base 26: mod_base = OTHER; note = 2'-O-methyl modified nucleotide
  modified_base 27: mod_base = OTHER; note = 2'-O-methyl modified nucleotide
  modified_base 28: mod_base = OTHER; note = 2'-O-methyl modified nucleotide
  modified_base 29: mod_base = OTHER; note = 2'-O-methyl modified nucleotide
  modified_base 30: mod_base = OTHER; note = 2'-O-methyl modified nucleotide
  modified_base 31: mod_base = OTHER; note = 2'-O-methyl modified nucleotide
  modified_base 32: mod_base = OTHER; note = 2'-O-methyl modified nucleotide
  modified_base 33: mod_base = OTHER; note = 2'-O-methyl modified nucleotide
  misc_difference 34: note = 2'-O-methyl modified nucleotide may be trivalent N-acetylgalactosamine modified
ncatattgagcatctctctagatgctcaatatga

SEQ ID NO: 1695 - RNA, 34 nt, synthetic construct
  source 1..34: mol_type = other RNA
  misc_difference 1: note = 2'-O-methyl modified nucleotide may be 5' phosphate modified
  modified_base 2: mod_base = OTHER; note = 2'-fluoro modified nucleotide
  modified_base 3: mod_base = OTHER; note = 2'-O-methyl modified nucleotide
  modified_base 4: mod_base = OTHER; note = 2'-O-methyl modified nucleotide
  modified_base 5: mod_base = OTHER; note = 2'-O-methyl modified nucleotide
  modified_base 6: mod_base = OTHER; note = 2'-O-methyl modified nucleotide
  modified_base 7: mod_base = OTHER; note = 2'-O-methyl modified nucleotide
  modified_base 8: mod_base = OTHER; note = 2'-O-methyl modified nucleotide
  modified_base 9: mod_base = OTHER; note = 2'-O-methyl modified nucleotide
  modified_base 10: mod_base = OTHER; note = 2'-O-methyl modified nucleotide
  modified_base 11: mod_base = OTHER; note = 2'-O-methyl modified nucleotide
  modified_base 12: mod_base = OTHER; note = 2'-O-methyl modified nucleotide
  modified_base 13: mod_base = OTHER; note = 2'-O-methyl modified nucleotide
  modified_base 14: mod_base = OTHER; note = 2'-fluoro modified nucleotide
  modified_base 15: mod_base = OTHER; note = 2'-O-methyl modified nucleotide
  modified_base 16: mod_base = OTHER; note = 2'-O-methyl modified nucleotide
  modified_base 17: mod_base = OTHER; note = 2'-O-methyl modified nucleotide
  modified_base 18: mod_base = OTHER; note = 2'-O-methyl modified nucleotide
  modified_base 19: mod_base = OTHER; note = 2'-O-methyl modified nucleotide
  modified_base 20: mod_base = OTHER; note = 2'-O-methyl modified nucleotide
  modified_base 21: mod_base = OTHER; note = 2'-O-methyl modified nucleotide
  modified_base 22: mod_base = OTHER; note = 2'-fluoro modified nucleotide
  modified_base 23: mod_base = OTHER; note = 2'-fluoro modified nucleotide
  modified_base 24: mod_base = OTHER; note = 2'-fluoro modified nucleotide
  modified_base 25: mod_base = OTHER; note = 2'-O-methyl modified nucleotide
  modified_base 26: mod_base = OTHER; note = 2'-O-methyl modified nucleotide
  modified_base 27: mod_base = OTHER; note = 2'-O-methyl modified nucleotide
  modified_base 28: mod_base = OTHER; note = 2'-O-methyl modified nucleotide
  modified_base 29: mod_base = OTHER; note = 2'-O-methyl modified nucleotide
  modified_base 30: mod_base = OTHER; note = 2'-O-methyl modified nucleotide
  modified_base 31: mod_base = OTHER; note = 2'-O-methyl modified nucleotide
  modified_base 32: mod_base = OTHER; note = 2'-O-methyl modified nucleotide
  modified_base 33: mod_base = OTHER; note = 2'-O-methyl modified nucleotide
  misc_difference 34: note = 2'-O-methyl modified nucleotide may be trivalent N-acetylgalactosamine modified
natccttgactttgaacactcaaagtcaaggata

SEQ ID NO: 1696 - RNA, 34 nt, synthetic construct
  source 1..34: mol_type = other RNA
  misc_difference 1: note = 2'-O-methyl modified nucleotide may be 5' phosphate modified
  modified_base 2: mod_base = OTHER; note = 2'-fluoro modified nucleotide
  modified_base 3: mod_base = OTHER; note = 2'-O-methyl modified nucleotide
  modified_base 4: mod_base = OTHER; note = 2'-O-methyl modified nucleotide
  modified_base 5: mod_base = OTHER; note = 2'-O-methyl modified nucleotide
  modified_base 6: mod_base = OTHER; note = 2'-O-methyl modified nucleotide
  modified_base 7: mod_base = OTHER; note = 2'-O-methyl modified nucleotide
  modified_base 8: mod_base = OTHER; note = 2'-O-methyl modified nucleotide
  modified_base 9: mod_base = OTHER; note = 2'-O-methyl modified nucleotide
  modified_base 10: mod_base = OTHER; note = 2'-O-methyl modified nucleotide
  modified_base 11: mod_base = OTHER; note = 2'-O-methyl modified nucleotide
  modified_base 12: mod_base = OTHER; note = 2'-O-methyl modified nucleotide
  modified_base 13: mod_base = OTHER; note = 2'-O-methyl modified nucleotide
  modified_base 14: mod_base = OTHER; note = 2'-fluoro modified nucleotide
  modified_base 15: mod_base = OTHER; note = 2'-O-methyl modified nucleotide
  modified_base 16: mod_base = OTHER; note = 2'-O-methyl modified nucleotide
  modified_base 17: mod_base = OTHER; note = 2'-O-methyl modified nucleotide
  modified_base 18: mod_base = OTHER; note = 2'-O-methyl modified nucleotide
  modified_base 19: mod_base = OTHER; note = 2'-O-methyl modified nucleotide
  modified_base 20: mod_base = OTHER; note = 2'-O-methyl modified nucleotide
  modified_base 21: mod_base = OTHER; note = 2'-O-methyl modified nucleotide
  modified_base 22: mod_base = OTHER; note = 2'-fluoro modified nucleotide
  modified_base 23: mod_base = OTHER; note = 2'-fluoro modified nucleotide
  modified_base 24: mod_base = OTHER; note = 2'-fluoro modified nucleotide
  modified_base 25: mod_base = OTHER; note = 2'-O-methyl modified nucleotide
  modified_base 26: mod_base = OTHER; note = 2'-O-methyl modified nucleotide
  modified_base 27: mod_base = OTHER; note = 2'-O-methyl modified nucleotide
  modified_base 28: mod_base = OTHER; note = 2'-O-methyl modified nucleotide
  modified_base 29: mod_base = OTHER; note = 2'-O-methyl modified nucleotide
  modified_base 30: mod_base = OTHER; note = 2'-O-methyl modified nucleotide
  modified_base 31: mod_base = OTHER; note = 2'-O-methyl modified nucleotide
  modified_base 32: mod_base = OTHER; note = 2'-O-methyl modified nucleotide
  modified_base 33: mod_base = OTHER; note = 2'-O-methyl modified nucleotide
  misc_difference 34: note = 2'-O-methyl modified nucleotide may be trivalent N-acetylgalactosamine modified
ngcagacatccactactcctagtggatgtctgca

SEQ ID NO: 1697 - RNA, 34 nt, synthetic construct
  source 1..34: mol_type = other RNA
  misc_difference 1: note = 2'-O-methyl modified nucleotide may be 5' phosphate modified
  modified_base 2: mod_base = OTHER; note = 2'-fluoro modified nucleotide
  modified_base 3: mod_base = OTHER; note = 2'-O-methyl modified nucleotide
  modified_base 4: mod_base = OTHER; note = 2'-O-methyl modified nucleotide
  modified_base 5: mod_base = OTHER; note = 2'-O-methyl modified nucleotide
  modified_base 6: mod_base = OTHER; note = 2'-O-methyl modified nucleotide
  modified_base 7: mod_base = OTHER; note = 2'-O-methyl modified nucleotide
  modified_base 8: mod_base = OTHER; note = 2'-O-methyl modified nucleotide
  modified_base 9: mod_base = OTHER; note = 2'-O-methyl modified nucleotide
  modified_base 10: mod_base = OTHER; note = 2'-O-methyl modified nucleotide
  modified_base 11: mod_base = OTHER; note = 2'-O-methyl modified nucleotide
  modified_base 12: mod_base = OTHER; note = 2'-O-methyl modified nucleotide
  modified_base 13: mod_base = OTHER; note = 2'-O-methyl modified nucleotide
  modified_base 14: mod_base = OTHER; note = 2'-fluoro modified nucleotide
  modified_base 15: mod_base = OTHER; note = 2'-O-methyl modified nucleotide
  modified_base 16: mod_base = OTHER; note = 2'-O-methyl modified nucleotide
  modified_base 17: mod_base = OTHER; note = 2'-O-methyl modified nucleotide
  modified_base 18: mod_base = OTHER; note = 2'-O-methyl modified nucleotide
  modified_base 19: mod_base = OTHER; note = 2'-O-methyl modified nucleotide
  modified_base 20: mod_base = OTHER; note = 2'-O-methyl modified nucleotide
  modified_base 21: mod_base = OTHER; note = 2'-O-methyl modified nucleotide
  modified_base 22: mod_base = OTHER; note = 2'-fluoro modified nucleotide
  modified_base 23: mod_base = OTHER; note = 2'-fluoro modified nucleotide
  modified_base 24: mod_base = OTHER; note = 2'-fluoro modified nucleotide
  modified_base 25: mod_base = OTHER; note = 2'-O-methyl modified nucleotide
  modified_base 26: mod_base = OTHER; note = 2'-O-methyl modified nucleotide
  modified_base 27: mod_base = OTHER; note = 2'-O-methyl modified nucleotide
  modified_base 28: mod_base = OTHER; note = 2'-O-methyl modified nucleotide
  modified_base 29: mod_base = OTHER; note = 2'-O-methyl modified nucleotide
  modified_base 30: mod_base = OTHER; note = 2'-O-methyl modified nucleotide
  modified_base 31: mod_base = OTHER; note = 2'-O-methyl modified nucleotide
  modified_base 32: mod_base = OTHER; note = 2'-O-methyl modified nucleotide
  modified_base 33: mod_base = OTHER; note = 2'-O-methyl modified nucleotide
  misc_difference 34: note = 2'-O-methyl modified nucleotide may be trivalent N-acetylgalactosamine modified
nagacctccttccgagtcatcggaaggaggtcta

SEQ ID NO: 1698 - RNA, 34 nt, synthetic construct
  source 1..34: mol_type = other RNA
  misc_difference 1: note = 2'-O-methyl modified nucleotide may be 5' phosphate modified
  modified_base 2: mod_base = OTHER; note = 2'-fluoro modified nucleotide
  modified_base 3: mod_base = OTHER; note = 2'-O-methyl modified nucleotide
  modified_base 4: mod_base = OTHER; note = 2'-O-methyl modified nucleotide
  modified_base 5: mod_base = OTHER; note = 2'-O-methyl modified nucleotide
  modified_base 6: mod_base = OTHER; note = 2'-O-methyl modified nucleotide
  modified_base 7: mod_base = OTHER; note = 2'-O-methyl modified nucleotide
  modified_base 8: mod_base = OTHER; note = 2'-O-methyl modified nucleotide
  modified_base 9: mod_base = OTHER; note = 2'-O-methyl modified nucleotide
  modified_base 10: mod_base = OTHER; note = 2'-O-methyl modified nucleotide
  modified_base 11: mod_base = OTHER; note = 2'-O-methyl modified nucleotide
  modified_base 12: mod_base = OTHER; note = 2'-O-methyl modified nucleotide
  modified_base 13: mod_base = OTHER; note = 2'-O-methyl modified nucleotide
  modified_base 14: mod_base = OTHER; note = 2'-fluoro modified nucleotide
  modified_base 15: mod_base = OTHER; note = 2'-O-methyl modified nucleotide
  modified_base 16: mod_base = OTHER; note = 2'-O-methyl modified nucleotide
  modified_base 17: mod_base = OTHER; note = 2'-O-methyl modified nucleotide
  modified_base 18: mod_base = OTHER; note = 2'-O-methyl modified nucleotide
  modified_base 19: mod_base = OTHER; note = 2'-O-methyl modified nucleotide
  modified_base 20: mod_base = OTHER; note = 2'-O-methyl modified nucleotide
  modified_base 21: mod_base = OTHER; note = 2'-O-methyl modified nucleotide
  modified_base 22: mod_base = OTHER; note = 2'-fluoro modified nucleotide
  modified_base 23: mod_base = OTHER; note = 2'-fluoro modified nucleotide
  modified_base 24: mod_base = OTHER; note = 2'-fluoro modified nucleotide
  modified_base 25: mod_base = OTHER; note = 2'-O-methyl modified nucleotide
  modified_base 26: mod_base = OTHER; note = 2'-O-methyl modified nucleotide
  modified_base 27: mod_base = OTHER; note = 2'-O-methyl modified nucleotide
  modified_base 28: mod_base = OTHER; note = 2'-O-methyl modified nucleotide
  modified_base 29: mod_base = OTHER; note = 2'-O-methyl modified nucleotide
  modified_base 30: mod_base = OTHER; note = 2'-O-methyl modified nucleotide
  modified_base 31: mod_base = OTHER; note = 2'-O-methyl modified nucleotide
  modified_base 32: mod_base = OTHER; note = 2'-O-methyl modified nucleotide
  modified_base 33: mod_base = OTHER; note = 2'-O-methyl modified nucleotide
  misc_difference 34: note = 2'-O-methyl modified nucleotide may be trivalent N-acetylgalactosamine modified
naccttctcaattaagttgttaattgagaaggta

SEQ ID NO: 1699 - RNA, 34 nt, synthetic construct
  source 1..34: mol_type = other RNA
  misc_difference 1: note = 2'-O-methyl modified nucleotide may be 5' phosphate modified
  modified_base 2: mod_base = OTHER; note = 2'-fluoro modified nucleotide
  modified_base 3: mod_base = OTHER; note = 2'-O-methyl modified nucleotide
  modified_base 4: mod_base = OTHER; note = 2'-O-methyl modified nucleotide
  modified_base 5: mod_base = OTHER; note = 2'-O-methyl modified nucleotide
  modified_base 6: mod_base = OTHER; note = 2'-O-methyl modified nucleotide
  modified_base 7: mod_base = OTHER; note = 2'-O-methyl modified nucleotide
  modified_base 8: mod_base = OTHER; note = 2'-O-methyl modified nucleotide
  modified_base 9: mod_base = OTHER; note = 2'-O-methyl modified nucleotide
  modified_base 10: mod_base = OTHER; note = 2'-O-methyl modified nucleotide
  modified_base 11: mod_base = OTHER; note = 2'-O-methyl modified nucleotide
  modified_base 12: mod_base = OTHER; note = 2'-O-methyl modified nucleotide
  modified_base 13: mod_base = OTHER; note = 2'-O-methyl modified nucleotide
  modified_base 14: mod_base = OTHER; note = 2'-fluoro modified nucleotide
  modified_base 15: mod_base = OTHER; note = 2'-O-methyl modified nucleotide
  modified_base 16: mod_base = OTHER; note = 2'-O-methyl modified nucleotide
  modified_base 17: mod_base = OTHER; note = 2'-O-methyl modified nucleotide
  modified_base 18: mod_base = OTHER; note = 2'-O-methyl modified nucleotide
  modified_base 19: mod_base = OTHER; note = 2'-O-methyl modified nucleotide
  modified_base 20: mod_base = OTHER; note = 2'-O-methyl modified nucleotide
  modified_base 21: mod_base = OTHER; note = 2'-O-methyl modified nucleotide
  modified_base 22: mod_base = OTHER; note = 2'-fluoro modified nucleotide
  modified_base 23: mod_base = OTHER; note = 2'-fluoro modified nucleotide
  modified_base 24: mod_base = OTHER; note = 2'-fluoro modified nucleotide
  modified_base 25: mod_base = OTHER; note = 2'-O-methyl modified nucleotide
  modified_base 26: mod_base = OTHER; note = 2'-O-methyl modified nucleotide
  modified_base 27: mod_base = OTHER; note = 2'-O-methyl modified nucleotide
  modified_base 28: mod_base = OTHER; note = 2'-O-methyl modified nucleotide
  modified_base 29: mod_base = OTHER; note = 2'-O-methyl modified nucleotide
  modified_base 30: mod_base = OTHER; note = 2'-O-methyl modified nucleotide
  modified_base 31: mod_base = OTHER; note = 2'-O-methyl modified nucleotide
  modified_base 32: mod_base = OTHER; note = 2'-O-methyl modified nucleotide
  modified_base 33: mod_base = OTHER; note = 2'-O-methyl modified nucleotide
  misc_difference 34: note = 2'-O-methyl modified nucleotide may be trivalent N-acetylgalactosamine modified
nagaagtcggaaggagccgtccttccgacttcta

SEQ ID NO: 1700 - RNA, 34 nt, synthetic construct
  source 1..34: mol_type = other RNA
  misc_difference 1: note = 2'-O-methyl modified nucleotide may be 5' phosphate modified
  modified_base 2: mod_base = OTHER; note = 2'-fluoro modified nucleotide
  modified_base 3: mod_base = OTHER; note = 2'-O-methyl modified nucleotide
  modified_base 4: mod_base = OTHER; note = 2'-O-methyl modified nucleotide
  modified_base 5: mod_base = OTHER; note = 2'-O-methyl modified nucleotide
  modified_base 6: mod_base = OTHER; note = 2'-O-methyl modified nucleotide
  modified_base 7: mod_base = OTHER; note = 2'-O-methyl modified nucleotide
  modified_base 8: mod_base = OTHER; note = 2'-O-methyl modified nucleotide
  modified_base 9: mod_base = OTHER; note = 2'-O-methyl modified nucleotide
  modified_base 10: mod_base = OTHER; note = 2'-O-methyl modified nucleotide
  modified_base 11: mod_base = OTHER; note = 2'-O-methyl modified nucleotide
  modified_base 12: mod_base = OTHER; note = 2'-O-methyl modified nucleotide
  modified_base 13: mod_base = OTHER; note = 2'-O-methyl modified nucleotide
  modified_base 14: mod_base = OTHER; note = 2'-fluoro modified nucleotide
  modified_base 15: mod_base = OTHER; note = 2'-O-methyl modified nucleotide
  modified_base 16: mod_base = OTHER; note = 2'-O-methyl modified nucleotide
  modified_base 17: mod_base = OTHER; note = 2'-O-methyl modified nucleotide
  modified_base 18: mod_base = OTHER; note = 2'-O-methyl modified nucleotide
  modified_base 19: mod_base = OTHER; note = 2'-O-methyl modified nucleotide
  modified_base 20: mod_base = OTHER; note = 2'-O-methyl modified nucleotide
  modified_base 21: mod_base = OTHER; note = 2'-O-methyl modified nucleotide
  modified_base 22: mod_base = OTHER; note = 2'-fluoro modified nucleotide
  modified_base 23: mod_base = OTHER; note = 2'-fluoro modified nucleotide
  modified_base 24: mod_base = OTHER; note = 2'-fluoro modified nucleotide
  modified_base 25: mod_base = OTHER; note = 2'-O-methyl modified nucleotide
  modified_base 26: mod_base = OTHER; note = 2'-O-methyl modified nucleotide
  modified_base 27: mod_base = OTHER; note = 2'-O-methyl modified nucleotide
  modified_base 28: mod_base = OTHER; note = 2'-O-methyl modified nucleotide
  modified_base 29: mod_base = OTHER; note = 2'-O-methyl modified nucleotide
  modified_base 30: mod_base = OTHER; note = 2'-O-methyl modified nucleotide
  modified_base 31: mod_base = OTHER; note = 2'-O-methyl modified nucleotide
  modified_base 32: mod_base = OTHER; note = 2'-O-methyl modified nucleotide
  modified_base 33: mod_base = OTHER; note = 2'-O-methyl modified nucleotide
  misc_difference 34: note = 2'-O-methyl modified nucleotide may be trivalent N-acetylgalactosamine modified
ntgcacagggtacgggtagccgtaccctgtgcaa

SEQ ID NO: 1701 - RNA, 34 nt, synthetic construct
  source 1..34: mol_type = other RNA
  misc_difference 1: note = 2'-O-methyl modified nucleotide may be 5' phosphate modified
  modified_base 2: mod_base = OTHER; note = 2'-fluoro modified nucleotide
  modified_base 3: mod_base = OTHER; note = 2'-O-methyl modified nucleotide
  modified_base 4: mod_base = OTHER; note = 2'-O-methyl modified nucleotide
  modified_base 5: mod_base = OTHER; note = 2'-O-methyl modified nucleotide
  modified_base 6: mod_base = OTHER; note = 2'-O-methyl modified nucleotide
  modified_base 7: mod_base = OTHER; note = 2'-O-methyl modified nucleotide
  modified_base 8: mod_base = OTHER; note = 2'-O-methyl modified nucleotide
  modified_base 9: mod_base = OTHER; note = 2'-O-methyl modified nucleotide
  modified_base 10: mod_base = OTHER; note = 2'-O-methyl modified nucleotide
  modified_base 11: mod_base = OTHER; note = 2'-O-methyl modified nucleotide
  modified_base 12: mod_base = OTHER; note = 2'-O-methyl modified nucleotide
  modified_base 13: mod_base = OTHER; note = 2'-O-methyl modified nucleotide
  modified_base 14: mod_base = OTHER; note = 2'-fluoro modified nucleotide
  modified_base 15: mod_base = OTHER; note = 2'-O-methyl modified nucleotide
  modified_base 16: mod_base = OTHER; note = 2'-O-methyl modified nucleotide
  modified_base 17: mod_base = OTHER; note = 2'-O-methyl modified nucleotide
  modified_base 18: mod_base = OTHER; note = 2'-O-methyl modified nucleotide
  modified_base 19: mod_base = OTHER; note = 2'-O-methyl modified nucleotide
  modified_base 20: mod_base = OTHER; note = 2'-O-methyl modified nucleotide
  modified_base 21: mod_base = OTHER; note = 2'-O-methyl modified nucleotide
  modified_base 22: mod_base = OTHER; note = 2'-fluoro modified nucleotide
  modified_base 23: mod_base = OTHER; note = 2'-fluoro modified nucleotide
  modified_base 24: mod_base = OTHER; note = 2'-fluoro modified nucleotide
  modified_base 25: mod_base = OTHER; note = 2'-O-methyl modified nucleotide
  modified_base 26: mod_base = OTHER; note = 2'-O-methyl modified nucleotide
  modified_base 27: mod_base = OTHER; note = 2'-O-methyl modified nucleotide
  modified_base 28: mod_base = OTHER; note = 2'-O-methyl modified nucleotide
  modified_base 29: mod_base = OTHER; note = 2'-O-methyl modified nucleotide
  modified_base 30: mod_base = OTHER; note = 2'-O-methyl modified nucleotide
  modified_base 31: mod_base = OTHER; note = 2'-O-methyl modified nucleotide
  modified_base 32: mod_base = OTHER; note = 2'-O-methyl modified nucleotide
  modified_base 33: mod_base = OTHER; note = 2'-O-methyl modified nucleotide
  misc_difference 34: note = 2'-O-methyl modified nucleotide may be trivalent N-acetylgalactosamine modified
natgacagtaattgggtccccaattactgtcata

SEQ ID NO: 1702 - RNA, 34 nt, synthetic construct
  source 1..34: mol_type = other RNA
  misc_difference 1: note = 2'-O-methyl modified nucleotide may be 5' phosphate modified
  modified_base 2: mod_base = OTHER; note = 2'-fluoro modified nucleotide
  modified_base 3: mod_base = OTHER; note = 2'-O-methyl modified nucleotide
  modified_base 4: mod_base = OTHER; note = 2'-O-methyl modified nucleotide
  modified_base 5: mod_base = OTHER; note = 2'-O-methyl modified nucleotide
  modified_base 6: mod_base = OTHER; note = 2'-O-methyl modified nucleotide
  modified_base 7: mod_base = OTHER; note = 2'-O-methyl modified nucleotide
  modified_base 8: mod_base = OTHER; note = 2'-O-methyl modified nucleotide
  modified_base 9: mod_base = OTHER; note = 2'-O-methyl modified nucleotide
  modified_base 10: mod_base = OTHER; note = 2'-O-methyl modified nucleotide
  modified_base 11: mod_base = OTHER; note = 2'-O-methyl modified nucleotide
  modified_base 12: mod_base = OTHER; note = 2'-O-methyl modified nucleotide
  modified_base 13: mod_base = OTHER; note = 2'-O-methyl modified nucleotide
  modified_base 14: mod_base = OTHER; note = 2'-fluoro modified nucleotide
  modified_base 15: mod_base = OTHER; note = 2'-O-methyl modified nucleotide
  modified_base 16: mod_base = OTHER; note = 2'-O-methyl modified nucleotide
  modified_base 17: mod_base = OTHER; note = 2'-O-methyl modified nucleotide
  modified_base 18: mod_base = OTHER; note = 2'-O-methyl modified nucleotide
  modified_base 19: mod_base = OTHER; note = 2'-O-methyl modified nucleotide
  modified_base 20: mod_base = OTHER; note = 2'-O-methyl modified nucleotide
  modified_base 21: mod_base = OTHER; note = 2'-O-methyl modified nucleotide
  modified_base 22: mod_base = OTHER; note = 2'-fluoro modified nucleotide
  modified_base 23: mod_base = OTHER; note = 2'-fluoro modified nucleotide
  modified_base 24: mod_base = OTHER; note = 2'-fluoro modified nucleotide
  modified_base 25: mod_base = OTHER; note = 2'-O-methyl modified nucleotide
  modified_base 26: mod_base = OTHER; note = 2'-O-methyl modified nucleotide
  modified_base 27: mod_base = OTHER; note = 2'-O-methyl modified nucleotide
  modified_base 28: mod_base = OTHER; note = 2'-O-methyl modified nucleotide
  modified_base 29: mod_base = OTHER; note = 2'-O-methyl modified nucleotide
  modified_base 30: mod_base = OTHER; note = 2'-O-methyl modified nucleotide
  modified_base 31: mod_base = OTHER; note = 2'-O-methyl modified nucleotide
  modified_base 32: mod_base = OTHER; note = 2'-O-methyl modified nucleotide
  modified_base 33: mod_base = OTHER; note = 2'-O-methyl modified nucleotide
  misc_difference 34: note = 2'-O-methyl modified nucleotide may be trivalent N-acetylgalactosamine modified
ngttagtccctgacttcaaagtcagggactaaca

SEQ ID NO: 1703 - RNA, 34 nt, synthetic construct
  source 1..34: mol_type = other RNA
  misc_difference 1: note = 2'-O-methyl modified nucleotide may be 5' phosphate modified
  modified_base 2: mod_base = OTHER; note = 2'-fluoro modified nucleotide
  modified_base 3: mod_base = OTHER; note = 2'-O-methyl modified nucleotide
  modified_base 4: mod_base = OTHER; note = 2'-O-methyl modified nucleotide
  modified_base 5: mod_base = OTHER; note = 2'-O-methyl modified nucleotide
  modified_base 6: mod_base = OTHER; note = 2'-O-methyl modified nucleotide
  modified_base 7: mod_base = OTHER; note = 2'-O-methyl modified nucleotide
  modified_base 8: mod_base = OTHER; note = 2'-O-methyl modified nucleotide
  modified_base 9: mod_base = OTHER; note = 2'-O-methyl modified nucleotide
  modified_base 10: mod_base = OTHER; note = 2'-O-methyl modified nucleotide
  modified_base 11: mod_base = OTHER; note = 2'-O-methyl modified nucleotide
  modified_base 12: mod_base = OTHER; note = 2'-O-methyl modified nucleotide
  modified_base 13: mod_base = OTHER; note = 2'-O-methyl modified nucleotide
  modified_base 14: mod_base = OTHER; note = 2'-fluoro modified nucleotide
  modified_base 15: mod_base = OTHER; note = 2'-O-methyl modified nucleotide
  modified_base 16: mod_base = OTHER; note = 2'-O-methyl modified nucleotide
  modified_base 17: mod_base = OTHER; note = 2'-O-methyl modified nucleotide
  modified_base 18: mod_base = OTHER; note = 2'-O-methyl modified nucleotide
  modified_base 19: mod_base = OTHER; note = 2'-O-methyl modified nucleotide
  modified_base 20: mod_base = OTHER; note = 2'-O-methyl modified nucleotide
  modified_base 21: mod_base = OTHER; note = 2'-O-methyl modified nucleotide
  modified_base 22: mod_base = OTHER; note = 2'-fluoro modified nucleotide
  modified_base 23: mod_base = OTHER; note = 2'-fluoro modified nucleotide
  modified_base 24: mod_base = OTHER; note = 2'-fluoro modified nucleotide
  modified_base 25: mod_base = OTHER; note = 2'-O-methyl modified nucleotide
  modified_base 26: mod_base = OTHER; note = 2'-O-methyl modified nucleotide
  modified_base 27: mod_base = OTHER; note = 2'-O-methyl modified nucleotide
  modified_base 28: mod_base = OTHER; note = 2'-O-methyl modified nucleotide
  modified_base 29: mod_base = OTHER; note = 2'-O-methyl modified nucleotide
  modified_base 30: mod_base = OTHER; note = 2'-O-methyl modified nucleotide
  modified_base 31: mod_base = OTHER; note = 2'-O-methyl modified nucleotide
  modified_base 32: mod_base = OTHER; note = 2'-O-methyl modified nucleotide
  modified_base 33: mod_base = OTHER; note = 2'-O-methyl modified nucleotide
  misc_difference 34: note = 2'-O-methyl modified nucleotide may be trivalent N-acetylgalactosamine modified
natatccttgactttgaacaaagtcaaggatata

SEQ ID NO: 1704 - RNA, 34 nt, synthetic construct
  source 1..34: mol_type = other RNA
  misc_difference 1: note = 2'-O-methyl modified nucleotide may be 5' phosphate modified
  modified_base 2: mod_base = OTHER; note = 2'-fluoro modified nucleotide
  modified_base 3: mod_base = OTHER; note = 2'-O-methyl modified nucleotide
  modified_base 4: mod_base = OTHER; note = 2'-O-methyl modified nucleotide
  modified_base 5: mod_base = OTHER; note = 2'-O-methyl modified nucleotide
  modified_base 6: mod_base = OTHER; note = 2'-O-methyl modified nucleotide
  modified_base 7: mod_base = OTHER; note = 2'-O-methyl modified nucleotide
  modified_base 8: mod_base = OTHER; note = 2'-O-methyl modified nucleotide
  modified_base 9: mod_base = OTHER; note = 2'-O-methyl modified nucleotide
  modified_base 10: mod_base = OTHER; note = 2'-O-methyl modified nucleotide
  modified_base 11: mod_base = OTHER; note = 2'-O-methyl modified nucleotide
  modified_base 12: mod_base = OTHER; note = 2'-O-methyl modified nucleotide
  modified_base 13: mod_base = OTHER; note = 2'-O-methyl modified nucleotide
  modified_base 14: mod_base = OTHER; note = 2'-fluoro modified nucleotide
  modified_base 15: mod_base = OTHER; note = 2'-O-methyl modified nucleotide
  modified_base 16: mod_base = OTHER; note = 2'-O-methyl modified nucleotide
  modified_base 17: mod_base = OTHER; note = 2'-O-methyl modified nucleotide
  modified_base 18: mod_base = OTHER; note = 2'-O-methyl modified nucleotide
  modified_base 19: mod_base = OTHER; note = 2'-O-methyl modified nucleotide
  modified_base 20: mod_base = OTHER; note = 2'-O-methyl modified nucleotide
  modified_base 21: mod_base = OTHER; note = 2'-O-methyl modified nucleotide
  modified_base 22: mod_base = OTHER; note = 2'-fluoro modified nucleotide
  modified_base 23: mod_base = OTHER; note = 2'-fluoro modified nucleotide
  modified_base 24: mod_base = OTHER; note = 2'-fluoro modified nucleotide
  modified_base 25: mod_base = OTHER; note = 2'-O-methyl modified nucleotide
  modified_base 26: mod_base = OTHER; note = 2'-O-methyl modified nucleotide
  modified_base 27: mod_base = OTHER; note = 2'-O-methyl modified nucleotide
  modified_base 28: mod_base = OTHER; note = 2'-O-methyl modified nucleotide
  modified_base 29: mod_base = OTHER; note = 2'-O-methyl modified nucleotide
  modified_base 30: mod_base = OTHER; note = 2'-O-methyl modified nucleotide
  modified_base 31: mod_base = OTHER; note = 2'-O-methyl modified nucleotide
  modified_base 32: mod_base = OTHER; note = 2'-O-methyl modified nucleotide
  modified_base 33: mod_base = OTHER; note = 2'-O-methyl modified nucleotide
  misc_difference 34: note = 2'-O-methyl modified nucleotide may be trivalent N-acetylgalactosamine modified
ngtacgtgtctgcacaggggtgcagacacgtaca

SEQ ID NO: 1705 - RNA, 34 nt, synthetic construct
  source 1..34: mol_type = other RNA
  misc_difference 1: note = 2'-O-methyl modified nucleotide may be 5' phosphate modified
  modified_base 2: mod_base = OTHER; note = 2'-fluoro modified nucleotide
  modified_base 3: mod_base = OTHER; note = 2'-O-methyl modified nucleotide
  modified_base 4: mod_base = OTHER; note = 2'-O-methyl modified nucleotide
  modified_base 5: mod_base = OTHER; note = 2'-O-methyl modified nucleotide
  modified_base 6: mod_base = OTHER; note = 2'-O-methyl modified nucleotide
  modified_base 7: mod_base = OTHER; note = 2'-O-methyl modified nucleotide
  modified_base 8: mod_base = OTHER; note = 2'-O-methyl modified nucleotide
  modified_base 9: mod_base = OTHER; note = 2'-O-methyl modified nucleotide
  modified_base 10: mod_base = OTHER; note = 2'-O-methyl modified nucleotide
  modified_base 11: mod_base = OTHER; note = 2'-O-methyl modified nucleotide
  modified_base 12: mod_base = OTHER; note = 2'-O-methyl modified nucleotide
  modified_base 13: mod_base = OTHER; note = 2'-O-methyl modified nucleotide
  modified_base 14: mod_base = OTHER; note = 2'-fluoro modified nucleotide
  modified_base 15: mod_base = OTHER; note = 2'-O-methyl modified nucleotide
  modified_base 16: mod_base = OTHER; note = 2'-O-methyl modified nucleotide
  modified_base 17: mod_base = OTHER; note = 2'-O-methyl modified nucleotide
  modified_base 18: mod_base = OTHER; note = 2'-O-methyl modified nucleotide
  modified_base 19: mod_base = OTHER; note = 2'-O-methyl modified nucleotide
  modified_base 20: mod_base = OTHER; note = 2'-O-methyl modified nucleotide
  modified_base 21: mod_base = OTHER; note = 2'-O-methyl modified nucleotide
  modified_base 22: mod_base = OTHER; note = 2'-fluoro modified nucleotide
  modified_base 23: mod_base = OTHER; note = 2'-fluoro modified nucleotide
  modified_base 24: mod_base = OTHER; note = 2'-fluoro modified nucleotide
  modified_base 25: mod_base = OTHER; note = 2'-O-methyl modified nucleotide
  modified_base 26: mod_base = OTHER; note = 2'-O-methyl modified nucleotide
  modified_base 27: mod_base = OTHER; note = 2'-O-methyl modified nucleotide
  modified_base 28: mod_base = OTHER; note = 2'-O-methyl modified nucleotide
  modified_base 29: mod_base = OTHER; note = 2'-O-methyl modified nucleotide
  modified_base 30: mod_base = OTHER; note = 2'-O-methyl modified nucleotide
  modified_base 31: mod_base = OTHER; note = 2'-O-methyl modified nucleotide
  modified_base 32: mod_base = OTHER; note = 2'-O-methyl modified nucleotide
  modified_base 33: mod_base = OTHER; note = 2'-O-methyl modified nucleotide
  misc_difference 34: note = 2'-O-methyl modified nucleotide may be trivalent N-acetylgalactosamine modified
ngtcagcacaaagtactcatactttgtgctgaca

SEQ ID NO: 1706 - RNA, 34 nt, synthetic construct
  source 1..34: mol_type = other RNA
  misc_difference 1: note = 2'-O-methyl modified nucleotide may be 5' phosphate modified
  modified_base 2: mod_base = OTHER; note = 2'-fluoro modified nucleotide
  modified_base 3: mod_base = OTHER; note = 2'-O-methyl modified nucleotide
  modified_base 4: mod_base = OTHER; note = 2'-O-methyl modified nucleotide
  modified_base 5: mod_base = OTHER; note = 2'-O-methyl modified nucleotide
  modified_base 6: mod_base = OTHER; note = 2'-O-methyl modified nucleotide
  modified_base 7: mod_base = OTHER; note = 2'-O-methyl modified nucleotide
  modified_base 8: mod_base = OTHER; note = 2'-O-methyl modified nucleotide
  modified_base 9: mod_base = OTHER; note = 2'-O-methyl modified nucleotide
  modified_base 10: mod_base = OTHER; note = 2'-O-methyl modified nucleotide
  modified_base 11: mod_base = OTHER; note = 2'-O-methyl modified nucleotide
  modified_base 12: mod_base = OTHER; note = 2'-O-methyl modified nucleotide
  modified_base 13: mod_base = OTHER; note = 2'-O-methyl modified nucleotide
  modified_base 14: mod_base = OTHER; note = 2'-fluoro modified nucleotide
  modified_base 15: mod_base = OTHER; note = 2'-O-methyl modified nucleotide
  modified_base 16: mod_base = OTHER; note = 2'-O-methyl modified nucleotide
  modified_base 17: mod_base = OTHER; note = 2'-O-methyl modified nucleotide
  modified_base 18: mod_base = OTHER; note = 2'-O-methyl modified nucleotide
  modified_base 19: mod_base = OTHER; note = 2'-O-methyl modified nucleotide
  modified_base 20: mod_base = OTHER; note = 2'-O-methyl modified nucleotide
  modified_base 21: mod_base = OTHER; note = 2'-O-methyl modified nucleotide
  modified_base 22: mod_base = OTHER; note = 2'-fluoro modified nucleotide
  modified_base 23: mod_base = OTHER; note = 2'-fluoro modified nucleotide
  modified_base 24: mod_base = OTHER; note = 2'-fluoro modified nucleotide
  modified_base 25: mod_base = OTHER; note = 2'-O-methyl modified nucleotide
  modified_base 26: mod_base = OTHER; note = 2'-O-methyl modified nucleotide
  modified_base 27: mod_base = OTHER; note = 2'-O-methyl modified nucleotide
  modified_base 28: mod_base = OTHER; note = 2'-O-methyl modified nucleotide
  modified_base 29: mod_base = OTHER; note = 2'-O-methyl modified nucleotide
  modified_base 30: mod_base = OTHER; note = 2'-O-methyl modified nucleotide
  modified_base 31: mod_base = OTHER; note = 2'-O-methyl modified nucleotide
  modified_base 32: mod_base = OTHER; note = 2'-O-methyl modified nucleotide
  modified_base 33: mod_base = OTHER; note = 2'-O-methyl modified nucleotide
  misc_difference 34: note = 2'-O-methyl modified nucleotide may be trivalent N-acetylgalactosamine modified
ntggtcttcataattgattaattatgaagaccaa

SEQ ID NO: 1707 - RNA, 34 nt, synthetic construct
  source 1..34: mol_type = other RNA
  misc_difference 1: note = 2'-O-methyl modified nucleotide may be 5' phosphate modified
  modified_base 2: mod_base = OTHER; note = 2'-fluoro modified nucleotide
  modified_base 3: mod_base = OTHER; note = 2'-O-methyl modified nucleotide
  modified_base 4: mod_base = OTHER; note = 2'-O-methyl modified nucleotide
  modified_base 5: mod_base = OTHER; note = 2'-O-methyl modified nucleotide
  modified_base 6: mod_base = OTHER; note = 2'-O-methyl modified nucleotide
  modified_base 7: mod_base = OTHER; note = 2'-O-methyl modified nucleotide
  modified_base 8: mod_base = OTHER; note = 2'-O-methyl modified nucleotide
  modified_base 9: mod_base = OTHER; note = 2'-O-methyl modified nucleotide
  modified_base 10: mod_base = OTHER; note = 2'-O-methyl modified nucleotide
  modified_base 11: mod_base = OTHER; note = 2'-O-methyl modified nucleotide
  modified_base 12: mod_base = OTHER; note = 2'-O-methyl modified nucleotide
  modified_base 13: mod_base = OTHER; note = 2'-O-methyl modified nucleotide
  modified_base 14: mod_base = OTHER; note = 2'-fluoro modified nucleotide
  modified_base 15: mod_base = OTHER; note = 2'-O-methyl modified nucleotide
  modified_base 16: mod_base = OTHER; note = 2'-O-methyl modified nucleotide
  modified_base 17: mod_base = OTHER; note = 2'-O-methyl modified nucleotide
  modified_base 18: mod_base = OTHER; note = 2'-O-methyl modified nucleotide
  modified_base 19: mod_base = OTHER; note = 2'-O-methyl modified nucleotide
  modified_base 20: mod_base = OTHER; note = 2'-O-methyl modified nucleotide
  modified_base 21: mod_base = OTHER; note = 2'-O-methyl modified nucleotide
  modified_base 22: mod_base = OTHER; note = 2'-fluoro modified nucleotide
  modified_base 23: mod_base = OTHER; note = 2'-fluoro modified nucleotide
  modified_base 24: mod_base = OTHER; note = 2'-fluoro modified nucleotide
  modified_base 25: mod_base = OTHER; note = 2'-O-methyl modified nucleotide
  modified_base 26: mod_base = OTHER; note = 2'-O-methyl modified nucleotide
  modified_base 27: mod_base = OTHER; note = 2'-O-methyl modified nucleotide
  modified_base 28: mod_base = OTHER; note = 2'-O-methyl modified nucleotide
  modified_base 29: mod_base = OTHER; note = 2'-O-methyl modified nucleotide
  modified_base 30: mod_base = OTHER; note = 2'-O-methyl modified nucleotide
  modified_base 31: mod_base = OTHER; note = 2'-O-methyl modified nucleotide
  modified_base 32: mod_base = OTHER; note = 2'-O-methyl modified nucleotide
  modified_base 33: mod_base = OTHER; note = 2'-O-methyl modified nucleotide
  misc_difference 34: note = 2'-O-methyl modified nucleotide may be trivalent N-acetylgalactosamine modified
ncagagactcagagactggtctctgagtctctga

SEQ ID NO: 1708 - RNA, 34 nt, synthetic construct
  source 1..34: mol_type = other RNA
  misc_difference 1: note = 2'-O-methyl modified nucleotide may be 5' phosphate modified
  modified_base 2: mod_base = OTHER; note = 2'-fluoro modified nucleotide
  modified_base 3: mod_base = OTHER; note = 2'-O-methyl modified nucleotide
  modified_base 4: mod_base = OTHER; note = 2'-O-methyl modified nucleotide
  modified_base 5: mod_base = OTHER; note = 2'-O-methyl modified nucleotide
  modified_base 6: mod_base = OTHER; note = 2'-O-methyl modified nucleotide
  modified_base 7: mod_base = OTHER; note = 2'-O-methyl modified nucleotide
  modified_base 8: mod_base = OTHER; note = 2'-O-methyl modified nucleotide
  modified_base 9: mod_base = OTHER; note = 2'-O-methyl modified nucleotide
  modified_base 10: mod_base = OTHER; note = 2'-O-methyl modified nucleotide
  modified_base 11: mod_base = OTHER; note = 2'-O-methyl modified nucleotide
  modified_base 12: mod_base = OTHER; note = 2'-O-methyl modified nucleotide
  modified_base 13: mod_base = OTHER; note = 2'-O-methyl modified nucleotide
  modified_base 14: mod_base = OTHER; note = 2'-fluoro modified nucleotide
  modified_base 15: mod_base = OTHER; note = 2'-O-methyl modified nucleotide
  modified_base 16: mod_base = OTHER; note = 2'-O-methyl modified nucleotide
  modified_base 17: mod_base = OTHER; note = 2'-O-methyl modified nucleotide
  modified_base 18: mod_base = OTHER; note = 2'-O-methyl modified nucleotide
  modified_base 19: mod_base = OTHER; note = 2'-O-methyl modified nucleotide
  modified_base 20: mod_base = OTHER; note = 2'-O-methyl modified nucleotide
  modified_base 21: mod_base = OTHER; note = 2'-O-methyl modified nucleotide
  modified_base 22: mod_base = OTHER; note = 2'-fluoro modified nucleotide
  modified_base 23: mod_base = OTHER; note = 2'-fluoro modified nucleotide
  modified_base 24: mod_base = OTHER; note = 2'-fluoro modified nucleotide
  modified_base 25: mod_base = OTHER; note = 2'-O-methyl modified nucleotide
  modified_base 26: mod_base = OTHER; note = 2'-O-methyl modified nucleotide
  modified_base 27: mod_base = OTHER; note = 2'-O-methyl modified nucleotide
  modified_base 28: mod_base = OTHER; note = 2'-O-methyl modified nucleotide
  modified_base 29: mod_base = OTHER; note = 2'-O-methyl modified nucleotide
  modified_base 30: mod_base = OTHER; note = 2'-O-methyl modified nucleotide
  modified_base 31: mod_base = OTHER; note = 2'-O-methyl modified nucleotide
  modified_base 32: mod_base = OTHER; note = 2'-O-methyl modified nucleotide
  modified_base 33: mod_base = OTHER; note = 2'-O-methyl modified nucleotide
  misc_difference 34: note = 2'-O-methyl modified nucleotide may be trivalent N-acetylgalactosamine modified
ntagacatccagataatcctatctggatgtctaa

SEQ ID NO: 1709 - RNA, 34 nt, synthetic construct
  source 1..34: mol_type = other RNA
  misc_difference 1: note = 2'-O-methyl modified nucleotide may be 5' phosphate modified
  modified_base 2: mod_base = OTHER; note = 2'-fluoro modified nucleotide
  modified_base 3: mod_base = OTHER; note = 2'-O-methyl modified nucleotide
  modified_base 4: mod_base = OTHER; note = 2'-O-methyl modified nucleotide
  modified_base 5: mod_base = OTHER; note = 2'-O-methyl modified nucleotide
  modified_base 6: mod_base = OTHER; note = 2'-O-methyl modified nucleotide
  modified_base 7: mod_base = OTHER; note = 2'-O-methyl modified nucleotide
  modified_base 8: mod_base = OTHER; note = 2'-O-methyl modified nucleotide
  modified_base 9: mod_base = OTHER; note = 2'-O-methyl modified nucleotide
  modified_base 10: mod_base = OTHER; note = 2'-O-methyl modified nucleotide
  modified_base 11: mod_base = OTHER; note = 2'-O-methyl modified nucleotide
  modified_base 12: mod_base = OTHER; note = 2'-O-methyl modified nucleotide
  modified_base 13: mod_base = OTHER; note = 2'-O-methyl modified nucleotide
  modified_base 14: mod_base = OTHER; note = 2'-fluoro modified nucleotide
  modified_base 15: mod_base = OTHER; note = 2'-O-methyl modified nucleotide
  modified_base 16: mod_base = OTHER; note = 2'-O-methyl modified nucleotide
  modified_base 17: mod_base = OTHER; note = 2'-O-methyl modified nucleotide
  modified_base 18: mod_base = OTHER; note = 2'-O-methyl modified nucleotide
  modified_base 19: mod_base = OTHER; note = 2'-O-methyl modified nucleotide
  modified_base 20: mod_base = OTHER; note = 2'-O-methyl modified nucleotide
  modified_base 21: mod_base = OTHER; note = 2'-O-methyl modified nucleotide
  modified_base 22: mod_base = OTHER; note = 2'-fluoro modified nucleotide
  modified_base 23: mod_base = OTHER; note = 2'-fluoro modified nucleotide
  modified_base 24: mod_base = OTHER; note = 2'-fluoro modified nucleotide
  modified_base 25: mod_base = OTHER; note = 2'-O-methyl modified nucleotide
  modified_base 26: mod_base = OTHER; note = 2'-O-methyl modified nucleotide
  modified_base 27: mod_base = OTHER; note = 2'-O-methyl modified nucleotide
  modified_base 28: mod_base = OTHER; note = 2'-O-methyl modified nucleotide
  modified_base 29: mod_base = OTHER; note = 2'-O-methyl modified nucleotide
  modified_base 30: mod_base = OTHER; note = 2'-O-methyl modified nucleotide
  modified_base 31: mod_base = OTHER; note = 2'-O-methyl modified nucleotide
  modified_base 32: mod_base = OTHER; note = 2'-O-methyl modified nucleotide
  modified_base 33: mod_base = OTHER; note = 2'-O-methyl modified nucleotide
  misc_difference 34: note = 2'-O-methyl modified nucleotide may be trivalent N-acetylgalactosamine modified
nctccttccgagtcagctttgactcggaaggaga

SEQ ID NO: 1710 - RNA, 34 nt, synthetic construct
  source 1..34: mol_type = other RNA
  misc_difference 1: note = 2'-O-methyl modified nucleotide may be 5' phosphate modified
  modified_base 2: mod_base = OTHER; note = 2'-fluoro modified nucleotide
  modified_base 3: mod_base = OTHER; note = 2'-O-methyl modified nucleotide
  modified_base 4: mod_base = OTHER; note = 2'-O-methyl modified nucleotide
  modified_base 5: mod_base = OTHER; note = 2'-O-methyl modified nucleotide
  modified_base 6: mod_base = OTHER; note = 2'-O-methyl modified nucleotide
  modified_base 7: mod_base = OTHER; note = 2'-O-methyl modified nucleotide
  modified_base 8: mod_base = OTHER; note = 2'-O-methyl modified nucleotide
  modified_base 9: mod_base = OTHER; note = 2'-O-methyl modified nucleotide
  modified_base 10: mod_base = OTHER; note = 2'-O-methyl modified nucleotide
  modified_base 11: mod_base = OTHER; note = 2'-O-methyl modified nucleotide
  modified_base 12: mod_base = OTHER; note = 2'-O-methyl modified nucleotide
  modified_base 13: mod_base = OTHER; note = 2'-O-methyl modified nucleotide
  modified_base 14: mod_base = OTHER; note = 2'-fluoro modified nucleotide
  modified_base 15: mod_base = OTHER; note = 2'-O-methyl modified nucleotide
  modified_base 16: mod_base = OTHER; note = 2'-O-methyl modified nucleotide
  modified_base 17: mod_base = OTHER; note = 2'-O-methyl modified nucleotide
  modified_base 18: mod_base = OTHER; note = 2'-O-methyl modified nucleotide
  modified_base 19: mod_base = OTHER; note = 2'-O-methyl modified nucleotide
  modified_base 20: mod_base = OTHER; note = 2'-O-methyl modified nucleotide
  modified_base 21: mod_base = OTHER; note = 2'-O-methyl modified nucleotide
  modified_base 22: mod_base = OTHER; note = 2'-fluoro modified nucleotide
  modified_base 23: mod_base = OTHER; note = 2'-fluoro modified nucleotide
  modified_base 24: mod_base = OTHER; note = 2'-fluoro modified nucleotide
  modified_base 25: mod_base = OTHER; note = 2'-O-methyl modified nucleotide
  modified_base 26: mod_base = OTHER; note = 2'-O-methyl modified nucleotide
  modified_base 27: mod_base = OTHER; note = 2'-O-methyl modified nucleotide
  modified_base 28: mod_base = OTHER; note = 2'-O-methyl modified nucleotide
  modified_base 29: mod_base = OTHER; note = 2'-O-methyl modified nucleotide
  modified_base 30: mod_base = OTHER; note = 2'-O-methyl modified nucleotide
  modified_base 31: mod_base = OTHER; note = 2'-O-methyl modified nucleotide
  modified_base 32: mod_base = OTHER; note = 2'-O-methyl modified nucleotide
  modified_base 33: mod_base = OTHER; note = 2'-O-methyl modified nucleotide
  misc_difference 34: note = 2'-O-methyl modified nucleotide may be trivalent N-acetylgalactosamine modified
ncatggagcctgaagggtccttcaggctccatga

SEQ ID NO: 1711 - RNA, 34 nt, synthetic construct
  source 1..34: mol_type = other RNA
  misc_difference 1: note = 2'-O-methyl modified nucleotide may be 5' phosphate modified
  modified_base 2: mod_base = OTHER; note = 2'-fluoro modified nucleotide
  modified_base 3: mod_base = OTHER; note = 2'-O-methyl modified nucleotide
  modified_base 4: mod_base = OTHER; note = 2'-O-methyl modified nucleotide
  modified_base 5: mod_base = OTHER; note = 2'-O-methyl modified nucleotide
  modified_base 6: mod_base = OTHER; note = 2'-O-methyl modified nucleotide
  modified_base 7: mod_base = OTHER; note = 2'-O-methyl modified nucleotide
  modified_base 8: mod_base = OTHER; note = 2'-O-methyl modified nucleotide
  modified_base 9: mod_base = OTHER; note = 2'-O-methyl modified nucleotide
  modified_base 10: mod_base = OTHER; note = 2'-O-methyl modified nucleotide
  modified_base 11: mod_base = OTHER; note = 2'-O-methyl modified nucleotide
  modified_base 12: mod_base = OTHER; note = 2'-O-methyl modified nucleotide
  modified_base 13: mod_base = OTHER; note = 2'-O-methyl modified nucleotide
  modified_base 14: mod_base = OTHER; note = 2'-fluoro modified nucleotide
  modified_base 15: mod_base = OTHER; note = 2'-O-methyl modified nucleotide
  modified_base 16: mod_base = OTHER; note = 2'-O-methyl modified nucleotide
  modified_base 17: mod_base = OTHER; note = 2'-O-methyl modified nucleotide
  modified_base 18: mod_base = OTHER; note = 2'-O-methyl modified nucleotide
  modified_base 19: mod_base = OTHER; note = 2'-O-methyl modified nucleotide
  modified_base 20: mod_base = OTHER; note = 2'-O-methyl modified nucleotide
  modified_base 21: mod_base = OTHER; note = 2'-O-methyl modified nucleotide
  modified_base 22: mod_base = OTHER; note = 2'-fluoro modified nucleotide
  modified_base 23: mod_base = OTHER; note = 2'-fluoro modified nucleotide
  modified_base 24: mod_base = OTHER; note = 2'-fluoro modified nucleotide
  modified_base 25: mod_base = OTHER; note = 2'-O-methyl modified nucleotide
  modified_base 26: mod_base = OTHER; note = 2'-O-methyl modified nucleotide
  modified_base 27: mod_base = OTHER; note = 2'-O-methyl modified nucleotide
  modified_base 28: mod_base = OTHER; note = 2'-O-methyl modified nucleotide
  modified_base 29: mod_base = OTHER; note = 2'-O-methyl modified nucleotide
  modified_base 30: mod_base = OTHER; note = 2'-O-methyl modified nucleotide
  modified_base 31: mod_base = OTHER; note = 2'-O-methyl modified nucleotide
  modified_base 32: mod_base = OTHER; note = 2'-O-methyl modified nucleotide
  modified_base 33: mod_base = OTHER; note = 2'-O-methyl modified nucleotide
  misc_difference 34: note = 2'-O-methyl modified nucleotide may be trivalent N-acetylgalactosamine modified
ntggcatatgtcactagacagtgacatatgccaa

SEQ ID NO: 1712 - RNA, 34 nt, synthetic construct
  source 1..34: mol_type = other RNA
  misc_difference 1: note = 2'-O-methyl modified nucleotide may be 5' phosphate modified
  modified_base 2: mod_base = OTHER; note = 2'-fluoro modified nucleotide
  modified_base 3: mod_base = OTHER; note = 2'-O-methyl modified nucleotide
  modified_base 4: mod_base = OTHER; note = 2'-O-methyl modified nucleotide
  modified_base 5: mod_base = OTHER; note = 2'-O-methyl modified nucleotide
  modified_base 6: mod_base = OTHER; note = 2'-O-methyl modified nucleotide
  modified_base 7: mod_base = OTHER; note = 2'-O-methyl modified nucleotide
  modified_base 8: mod_base = OTHER; note = 2'-O-methyl modified nucleotide
  modified_base 9: mod_base = OTHER; note = 2'-O-methyl modified nucleotide
  modified_base 10: mod_base = OTHER; note = 2'-O-methyl modified nucleotide
  modified_base 11: mod_base = OTHER; note = 2'-O-methyl modified nucleotide
  modified_base 12: mod_base = OTHER; note = 2'-O-methyl modified nucleotide
  modified_base 13: mod_base = OTHER; note = 2'-O-methyl modified nucleotide
  modified_base 14: mod_base = OTHER; note = 2'-fluoro modified nucleotide
  modified_base 15: mod_base = OTHER; note = 2'-O-methyl modified nucleotide
  modified_base 16: mod_base = OTHER; note = 2'-O-methyl modified nucleotide
  modified_base 17: mod_base = OTHER; note = 2'-O-methyl modified nucleotide
  modified_base 18: mod_base = OTHER; note = 2'-O-methyl modified nucleotide
  modified_base 19: mod_base = OTHER; note = 2'-O-methyl modified nucleotide
  modified_base 20: mod_base = OTHER; note = 2'-O-methyl modified nucleotide
  modified_base 21: mod_base = OTHER; note = 2'-O-methyl modified nucleotide
  modified_base 22: mod_base = OTHER; note = 2'-fluoro modified nucleotide
  modified_base 23: mod_base = OTHER; note = 2'-fluoro modified nucleotide
  modified_base 24: mod_base = OTHER; note = 2'-fluoro modified nucleotide
  modified_base 25: mod_base = OTHER; note = 2'-O-methyl modified nucleotide
  modified_base 26: mod_base = OTHER; note = 2'-O-methyl modified nucleotide
  modified_base 27: mod_base = OTHER; note = 2'-O-methyl modified nucleotide
  modified_base 28: mod_base = OTHER; note = 2'-O-methyl modified nucleotide
  modified_base 29: mod_base = OTHER; note = 2'-O-methyl modified nucleotide
  modified_base 30: mod_base = OTHER; note = 2'-O-methyl modified nucleotide
  modified_base 31: mod_base = OTHER; note = 2'-O-methyl modified nucleotide
  modified_base 32: mod_base = OTHER; note = 2'-O-methyl modified nucleotide
  modified_base 33: mod_base = OTHER; note = 2'-O-methyl modified nucleotide
  misc_difference 34: note = 2'-O-methyl modified nucleotide may be trivalent N-acetylgalactosamine modified
naagcattgatgttcacttgaacatcaatgctta

SEQ ID NO: 1713 - RNA, 34 nt, synthetic construct
  source 1..34: mol_type = other RNA
  misc_difference 1: note = 2'-O-methyl modified nucleotide may be 5' phosphate modified
  modified_base 2: mod_base = OTHER; note = 2'-fluoro modified nucleotide
  modified_base 3: mod_base = OTHER; note = 2'-O-methyl modified nucleotide
  modified_base 4: mod_base = OTHER; note = 2'-O-methyl modified nucleotide
  modified_base 5: mod_base = OTHER; note = 2'-O-methyl modified nucleotide
  modified_base 6: mod_base = OTHER; note = 2'-O-methyl modified nucleotide
  modified_base 7: mod_base = OTHER; note = 2'-O-methyl modified nucleotide
  modified_base 8: mod_base = OTHER; note = 2'-O-methyl modified nucleotide
  modified_base 9: mod_base = OTHER; note = 2'-O-methyl modified nucleotide
  modified_base 10: mod_base = OTHER; note = 2'-O-methyl modified nucleotide
  modified_base 11: mod_base = OTHER; note = 2'-O-methyl modified nucleotide
  modified_base 12: mod_base = OTHER; note = 2'-O-methyl modified nucleotide
  modified_base 13: mod_base = OTHER; note = 2'-O-methyl modified nucleotide
  modified_base 14: mod_base = OTHER; note = 2'-fluoro modified nucleotide
  modified_base 15: mod_base = OTHER; note = 2'-O-methyl modified nucleotide
  modified_base 16: mod_base = OTHER; note = 2'-O-methyl modified nucleotide
  modified_base 17: mod_base = OTHER; note = 2'-O-methyl modified nucleotide
  modified_base 18: mod_base = OTHER; note = 2'-O-methyl modified nucleotide
  modified_base 19: mod_base = OTHER; note = 2'-O-methyl modified nucleotide
  modified_base 20: mod_base = OTHER; note = 2'-O-methyl modified nucleotide
  modified_base 21: mod_base = OTHER; note = 2'-O-methyl modified nucleotide
  modified_base 22: mod_base = OTHER; note = 2'-fluoro modified nucleotide
  modified_base 23: mod_base = OTHER; note = 2'-fluoro modified nucleotide
  modified_base 24: mod_base = OTHER; note = 2'-fluoro modified nucleotide
  modified_base 25: mod_base = OTHER; note = 2'-O-methyl modified nucleotide
  modified_base 26: mod_base = OTHER; note = 2'-O-methyl modified nucleotide
  modified_base 27: mod_base = OTHER; note = 2'-O-methyl modified nucleotide
  modified_base 28: mod_base = OTHER; note = 2'-O-methyl modified nucleotide
  modified_base 29: mod_base = OTHER; note = 2'-O-methyl modified nucleotide
  modified_base 30: mod_base = OTHER; note = 2'-O-methyl modified nucleotide
  modified_base 31: mod_base = OTHER; note = 2'-O-methyl modified nucleotide
  modified_base 32: mod_base = OTHER; note = 2'-O-methyl modified nucleotide
  modified_base 33: mod_base = OTHER; note = 2'-O-methyl modified nucleotide
  misc_difference 34: note = 2'-O-methyl modified nucleotide may be trivalent N-acetylgalactosamine modified
nctcactcctccagtacaaactggaggagtgaga

SEQ ID NO: 1714 - RNA, 34 nt, synthetic construct
  source 1..34: mol_type = other RNA
  misc_difference 1: note = 2'-O-methyl modified nucleotide may be 5' phosphate modified
  modified_base 2: mod_base = OTHER; note = 2'-fluoro modified nucleotide
  modified_base 3: mod_base = OTHER; note = 2'-O-methyl modified nucleotide
  modified_base 4: mod_base = OTHER; note = 2'-O-methyl modified nucleotide
  modified_base 5: mod_base = OTHER; note = 2'-O-methyl modified nucleotide
  modified_base 6: mod_base = OTHER; note = 2'-O-methyl modified nucleotide
  modified_base 7: mod_base = OTHER; note = 2'-O-methyl modified nucleotide
  modified_base 8: mod_base = OTHER; note = 2'-O-methyl modified nucleotide
  modified_base 9: mod_base = OTHER; note = 2'-O-methyl modified nucleotide
  modified_base 10: mod_base = OTHER; note = 2'-O-methyl modified nucleotide
  modified_base 11: mod_base = OTHER; note = 2'-O-methyl modified nucleotide
  modified_base 12: mod_base = OTHER; note = 2'-O-methyl modified nucleotide
  modified_base 13: mod_base = OTHER; note = 2'-O-methyl modified nucleotide
  modified_base 14: mod_base = OTHER; note = 2'-fluoro modified nucleotide
  modified_base 15: mod_base = OTHER; note = 2'-O-methyl modified nucleotide
  modified_base 16: mod_base = OTHER; note = 2'-O-methyl modified nucleotide
  modified_base 17: mod_base = OTHER; note = 2'-O-methyl modified nucleotide
  modified_base 18: mod_base = OTHER; note = 2'-O-methyl modified nucleotide
  modified_base 19: mod_base = OTHER; note = 2'-O-methyl modified nucleotide
  modified_base 20: mod_base = OTHER; note = 2'-O-methyl modified nucleotide
  modified_base 21: mod_base = OTHER; note = 2'-O-methyl modified nucleotide
  modified_base 22: mod_base = OTHER; note = 2'-fluoro modified nucleotide
  modified_base 23: mod_base = OTHER; note = 2'-fluoro modified nucleotide
  modified_base 24: mod_base = OTHER; note = 2'-fluoro modified nucleotide
  modified_base 25: mod_base = OTHER; note = 2'-O-methyl modified nucleotide
  modified_base 26: mod_base = OTHER; note = 2'-O-methyl modified nucleotide
  modified_base 27: mod_base = OTHER; note = 2'-O-methyl modified nucleotide
  modified_base 28: mod_base = OTHER; note = 2'-O-methyl modified nucleotide
  modified_base 29: mod_base = OTHER; note = 2'-O-methyl modified nucleotide
  modified_base 30: mod_base = OTHER; note = 2'-O-methyl modified nucleotide
  modified_base 31: mod_base = OTHER; note = 2'-O-methyl modified nucleotide
  modified_base 32: mod_base = OTHER; note = 2'-O-methyl modified nucleotide
  modified_base 33: mod_base = OTHER; note = 2'-O-methyl modified nucleotide
  misc_difference 34: note = 2'-O-methyl modified nucleotide may be trivalent N-acetylgalactosamine modified
ngatgtccttgactttgtcaagtcaaggacatca

SEQ ID NO: 1715 - RNA, 34 nt, synthetic construct
  source 1..34: mol_type = other RNA
  misc_difference 1: note = 2'-O-methyl modified nucleotide may be 5' phosphate modified
  modified_base 2: mod_base = OTHER; note = 2'-fluoro modified nucleotide
  modified_base 3: mod_base = OTHER; note = 2'-O-methyl modified nucleotide
  modified_base 4: mod_base = OTHER; note = 2'-O-methyl modified nucleotide
  modified_base 5: mod_base = OTHER; note = 2'-O-methyl modified nucleotide
  modified_base 6: mod_base = OTHER; note = 2'-O-methyl modified nucleotide
  modified_base 7: mod_base = OTHER; note = 2'-O-methyl modified nucleotide
  modified_base 8: mod_base = OTHER; note = 2'-O-methyl modified nucleotide
  modified_base 9: mod_base = OTHER; note = 2'-O-methyl modified nucleotide
  modified_base 10: mod_base = OTHER; note = 2'-O-methyl modified nucleotide
  modified_base 11: mod_base = OTHER; note = 2'-O-methyl modified nucleotide
  modified_base 12: mod_base = OTHER; note = 2'-O-methyl modified nucleotide
  modified_base 13: mod_base = OTHER; note = 2'-O-methyl modified nucleotide
  modified_base 14: mod_base = OTHER; note = 2'-fluoro modified nucleotide
  modified_base 15: mod_base = OTHER; note = 2'-O-methyl modified nucleotide
  modified_base 16: mod_base = OTHER; note = 2'-O-methyl modified nucleotide
  modified_base 17: mod_base = OTHER; note = 2'-O-methyl modified nucleotide
  modified_base 18: mod_base = OTHER; note = 2'-O-methyl modified nucleotide
  modified_base 19: mod_base = OTHER; note = 2'-O-methyl modified nucleotide
  modified_base 20: mod_base = OTHER; note = 2'-O-methyl modified nucleotide
  modified_base 21: mod_base = OTHER; note = 2'-O-methyl modified nucleotide
  modified_base 22: mod_base = OTHER; note = 2'-fluoro modified nucleotide
  modified_base 23: mod_base = OTHER; note = 2'-fluoro modified nucleotide
  modified_base 24: mod_base = OTHER; note = 2'-fluoro modified nucleotide
  modified_base 25: mod_base = OTHER; note = 2'-O-methyl modified nucleotide
  modified_base 26: mod_base = OTHER; note = 2'-O-methyl modified nucleotide
  modified_base 27: mod_base = OTHER; note = 2'-O-methyl modified nucleotide
  modified_base 28: mod_base = OTHER; note = 2'-O-methyl modified nucleotide
  modified_base 29: mod_base = OTHER; note = 2'-O-methyl modified nucleotide
  modified_base 30: mod_base = OTHER; note = 2'-O-methyl modified nucleotide
  modified_base 31: mod_base = OTHER; note = 2'-O-methyl modified nucleotide
  modified_base 32: mod_base = OTHER; note = 2'-O-methyl modified nucleotide
  modified_base 33: mod_base = OTHER; note = 2'-O-methyl modified nucleotide
  misc_difference 34: note = 2'-O-methyl modified nucleotide may be trivalent N-acetylgalactosamine modified
ntgttttaattcaatcccaattgaattaaaacaa

SEQ ID NO: 1716 - RNA, 34 nt, synthetic construct
  source 1..34: mol_type = other RNA
  misc_difference 1: note = 2'-O-methyl modified nucleotide may be 5' phosphate modified
  modified_base 2: mod_base = OTHER; note = 2'-fluoro modified nucleotide
  modified_base 3: mod_base = OTHER; note = 2'-O-methyl modified nucleotide
  modified_base 4: mod_base = OTHER; note = 2'-O-methyl modified nucleotide
  modified_base 5: mod_base = OTHER; note = 2'-O-methyl modified nucleotide
  modified_base 6: mod_base = OTHER; note = 2'-O-methyl modified nucleotide
  modified_base 7: mod_base = OTHER; note = 2'-O-methyl modified nucleotide
  modified_base 8: mod_base = OTHER; note = 2'-O-methyl modified nucleotide
  modified_base 9: mod_base = OTHER; note = 2'-O-methyl modified nucleotide
  modified_base 10: mod_base = OTHER; note = 2'-O-methyl modified nucleotide
  modified_base 11: mod_base = OTHER; note = 2'-O-methyl modified nucleotide
  modified_base 12: mod_base = OTHER; note = 2'-O-methyl modified nucleotide
  modified_base 13: mod_base = OTHER; note = 2'-O-methyl modified nucleotide
  modified_base 14: mod_base = OTHER; note = 2'-fluoro modified nucleotide
  modified_base 15: mod_base = OTHER; note = 2'-O-methyl modified nucleotide
  modified_base 16: mod_base = OTHER; note = 2'-O-methyl modified nucleotide
  modified_base 17: mod_base = OTHER; note = 2'-O-methyl modified nucleotide
  modified_base 18: mod_base = OTHER; note = 2'-O-methyl modified nucleotide
  modified_base 19: mod_base = OTHER; note = 2'-O-methyl modified nucleotide
  modified_base 20: mod_base = OTHER; note = 2'-O-methyl modified nucleotide
  modified_base 21: mod_base = OTHER; note = 2'-O-methyl modified nucleotide
  modified_base 22: mod_base = OTHER; note = 2'-fluoro modified nucleotide
  modified_base 23: mod_base = OTHER; note = 2'-fluoro modified nucleotide
  modified_base 24: mod_base = OTHER; note = 2'-fluoro modified nucleotide
  modified_base 25: mod_base = OTHER; note = 2'-O-methyl modified nucleotide
  modified_base 26: mod_base = OTHER; note = 2'-O-methyl modified nucleotide
  modified_base 27: mod_base = OTHER; note = 2'-O-methyl modified nucleotide
  modified_base 28: mod_base = OTHER; note = 2'-O-methyl modified nucleotide
  modified_base 29: mod_base = OTHER; note = 2'-O-methyl modified nucleotide
  modified_base 30: mod_base = OTHER; note = 2'-O-methyl modified nucleotide
  modified_base 31: mod_base = OTHER; note = 2'-O-methyl modified nucleotide
  modified_base 32: mod_base = OTHER; note = 2'-O-methyl modified nucleotide
  modified_base 33: mod_base = OTHER; note = 2'-O-methyl modified nucleotide
  misc_difference 34: note = 2'-O-methyl modified nucleotide may be trivalent N-acetylgalactosamine modified
ntagatgttcatggagccttccatgaacatctaa

SEQ ID NO: 1717 - RNA, 34 nt, synthetic construct
  source 1..34: mol_type = other RNA
  misc_difference 1: note = 2'-O-methyl modified nucleotide may be 5' phosphate modified
  modified_base 2: mod_base = OTHER; note = 2'-fluoro modified nucleotide
  modified_base 3: mod_base = OTHER; note = 2'-O-methyl modified nucleotide
  modified_base 4: mod_base = OTHER; note = 2'-O-methyl modified nucleotide
  modified_base 5: mod_base = OTHER; note = 2'-O-methyl modified nucleotide
  modified_base 6: mod_base = OTHER; note = 2'-O-methyl modified nucleotide
  modified_base 7: mod_base = OTHER; note = 2'-O-methyl modified nucleotide
  modified_base 8: mod_base = OTHER; note = 2'-O-methyl modified nucleotide
  modified_base 9: mod_base = OTHER; note = 2'-O-methyl modified nucleotide
  modified_base 10: mod_base = OTHER; note = 2'-O-methyl modified nucleotide
  modified_base 11: mod_base = OTHER; note = 2'-O-methyl modified nucleotide
  modified_base 12: mod_base = OTHER; note = 2'-O-methyl modified nucleotide
  modified_base 13: mod_base = OTHER; note = 2'-O-methyl modified nucleotide
  modified_base 14: mod_base = OTHER; note = 2'-fluoro modified nucleotide
  modified_base 15: mod_base = OTHER; note = 2'-O-methyl modified nucleotide
  modified_base 16: mod_base = OTHER; note = 2'-O-methyl modified nucleotide
  modified_base 17: mod_base = OTHER; note = 2'-O-methyl modified nucleotide
  modified_base 18: mod_base = OTHER; note = 2'-O-methyl modified nucleotide
  modified_base 19: mod_base = OTHER; note = 2'-O-methyl modified nucleotide
  modified_base 20: mod_base = OTHER; note = 2'-O-methyl modified nucleotide
  modified_base 21: mod_base = OTHER; note = 2'-O-methyl modified nucleotide
  modified_base 22: mod_base = OTHER; note = 2'-fluoro modified nucleotide
  modified_base 23: mod_base = OTHER; note = 2'-fluoro modified nucleotide
  modified_base 24: mod_base = OTHER; note = 2'-fluoro modified nucleotide
  modified_base 25: mod_base = OTHER; note = 2'-O-methyl modified nucleotide
  modified_base 26: mod_base = OTHER; note = 2'-O-methyl modified nucleotide
  modified_base 27: mod_base = OTHER; note = 2'-O-methyl modified nucleotide
  modified_base 28: mod_base = OTHER; note = 2'-O-methyl modified nucleotide
  modified_base 29: mod_base = OTHER; note = 2'-O-methyl modified nucleotide
  modified_base 30: mod_base = OTHER; note = 2'-O-methyl modified nucleotide
  modified_base 31: mod_base = OTHER; note = 2'-O-methyl modified nucleotide
  modified_base 32: mod_base = OTHER; note = 2'-O-methyl modified nucleotide
  modified_base 33: mod_base = OTHER; note = 2'-O-methyl modified nucleotide
  misc_difference 34: note = 2'-O-methyl modified nucleotide may be trivalent N-acetylgalactosamine modified
natagcagtggaaagagatctttccactgctata

SEQ ID NO: 1718 - RNA, 34 nt, synthetic construct
  source 1..34: mol_type = other RNA
  misc_difference 1: note = 2'-O-methyl modified nucleotide may be 5' phosphate modified
  modified_base 2: mod_base = OTHER; note = 2'-fluoro modified nucleotide
  modified_base 3: mod_base = OTHER; note = 2'-O-methyl modified nucleotide
  modified_base 4: mod_base = OTHER; note = 2'-O-methyl modified nucleotide
  modified_base 5: mod_base = OTHER; note = 2'-O-methyl modified nucleotide
  modified_base 6: mod_base = OTHER; note = 2'-O-methyl modified nucleotide
  modified_base 7: mod_base = OTHER; note = 2'-O-methyl modified nucleotide
  modified_base 8: mod_base = OTHER; note = 2'-O-methyl modified nucleotide
  modified_base 9: mod_base = OTHER; note = 2'-O-methyl modified nucleotide
  modified_base 10: mod_base = OTHER; note = 2'-O-methyl modified nucleotide
  modified_base 11: mod_base = OTHER; note = 2'-O-methyl modified nucleotide
  modified_base 12: mod_base = OTHER; note = 2'-O-methyl modified nucleotide
  modified_base 13: mod_base = OTHER; note = 2'-O-methyl modified nucleotide
  modified_base 14: mod_base = OTHER; note = 2'-fluoro modified nucleotide
  modified_base 15: mod_base = OTHER; note = 2'-O-methyl modified nucleotide
  modified_base 16: mod_base = OTHER; note = 2'-O-methyl modified nucleotide
  modified_base 17: mod_base = OTHER; note = 2'-O-methyl modified nucleotide
  modified_base 18: mod_base = OTHER; note = 2'-O-methyl modified nucleotide
  modified_base 19: mod_base = OTHER; note = 2'-O-methyl modified nucleotide
  modified_base 20: mod_base = OTHER; note = 2'-O-methyl modified nucleotide
  modified_base 21: mod_base = OTHER; note = 2'-O-methyl modified nucleotide
  modified_base 22: mod_base = OTHER; note = 2'-fluoro modified nucleotide
  modified_base 23: mod_base = OTHER; note = 2'-fluoro modified nucleotide
  modified_base 24: mod_base = OTHER; note = 2'-fluoro modified nucleotide
  modified_base 25: mod_base = OTHER; note = 2'-O-methyl modified nucleotide
  modified_base 26: mod_base = OTHER; note = 2'-O-methyl modified nucleotide
  modified_base 27: mod_base = OTHER; note = 2'-O-methyl modified nucleotide
  modified_base 28: mod_base = OTHER; note = 2'-O-methyl modified nucleotide
  modified_base 29: mod_base = OTHER; note = 2'-O-methyl modified nucleotide
  modified_base 30: mod_base = OTHER; note = 2'-O-methyl modified nucleotide
  modified_base 31: mod_base = OTHER; note = 2'-O-methyl modified nucleotide
  modified_base 32: mod_base = OTHER; note = 2'-O-methyl modified nucleotide
  modified_base 33: mod_base = OTHER; note = 2'-O-methyl modified nucleotide
  misc_difference 34: note = 2'-O-methyl modified nucleotide may be trivalent N-acetylgalactosamine modified
ncattcacttggcaggtgcctgccaagtgaatga

SEQ ID NO: 1719 - RNA, 34 nt, synthetic construct
  source 1..34: mol_type = other RNA
  misc_difference 1: note = 2'-O-methyl modified nucleotide may be 5' phosphate modified
  modified_base 2: mod_base = OTHER; note = 2'-fluoro modified nucleotide
  modified_base 3: mod_base = OTHER; note = 2'-O-methyl modified nucleotide
  modified_base 4: mod_base = OTHER; note = 2'-O-methyl modified nucleotide
  modified_base 5: mod_base = OTHER; note = 2'-O-methyl modified nucleotide
  modified_base 6: mod_base = OTHER; note = 2'-O-methyl modified nucleotide
  modified_base 7: mod_base = OTHER; note = 2'-O-methyl modified nucleotide
  modified_base 8: mod_base = OTHER; note = 2'-O-methyl modified nucleotide
  modified_base 9: mod_base = OTHER; note = 2'-O-methyl modified nucleotide
  modified_base 10: mod_base = OTHER; note = 2'-O-methyl modified nucleotide
  modified_base 11: mod_base = OTHER; note = 2'-O-methyl modified nucleotide
  modified_base 12: mod_base = OTHER; note = 2'-O-methyl modified nucleotide
  modified_base 13: mod_base = OTHER; note = 2'-O-methyl modified nucleotide
  modified_base 14: mod_base = OTHER; note = 2'-fluoro modified nucleotide
  modified_base 15: mod_base = OTHER; note = 2'-O-methyl modified nucleotide
  modified_base 16: mod_base = OTHER; note = 2'-O-methyl modified nucleotide
  modified_base 17: mod_base = OTHER; note = 2'-O-methyl modified nucleotide
  modified_base 18: mod_base = OTHER; note = 2'-O-methyl modified nucleotide
  modified_base 19: mod_base = OTHER; note = 2'-O-methyl modified nucleotide
  modified_base 20: mod_base = OTHER; note = 2'-O-methyl modified nucleotide
  modified_base 21: mod_base = OTHER; note = 2'-O-methyl modified nucleotide
  modified_base 22: mod_base = OTHER; note = 2'-fluoro modified nucleotide
  modified_base 23: mod_base = OTHER; note = 2'-fluoro modified nucleotide
  modified_base 24: mod_base = OTHER; note = 2'-fluoro modified nucleotide
  modified_base 25: mod_base = OTHER; note = 2'-O-methyl modified nucleotide
  modified_base 26: mod_base = OTHER; note = 2'-O-methyl modified nucleotide
  modified_base 27: mod_base = OTHER; note = 2'-O-methyl modified nucleotide
  modified_base 28: mod_base = OTHER; note = 2'-O-methyl modified nucleotide
  modified_base 29: mod_base = OTHER; note = 2'-O-methyl modified nucleotide
  modified_base 30: mod_base = OTHER; note = 2'-O-methyl modified nucleotide
  modified_base 31: mod_base = OTHER; note = 2'-O-methyl modified nucleotide
  modified_base 32: mod_base = OTHER; note = 2'-O-methyl modified nucleotide
  modified_base 33: mod_base = OTHER; note = 2'-O-methyl modified nucleotide
  misc_difference 34: note = 2'-O-methyl modified nucleotide may be trivalent N-acetylgalactosamine modified
nattgatgttcacttggttaagtgaacatcaata

SEQ ID NO: 1720 - RNA, 34 nt, synthetic construct
  source 1..34: mol_type = other RNA
  misc_difference 1: note = 2'-O-methyl modified nucleotide may be 5' phosphate modified
  modified_base 2: mod_base = OTHER; note = 2'-fluoro modified nucleotide
  modified_base 3: mod_base = OTHER; note = 2'-O-methyl modified nucleotide
  modified_base 4: mod_base = OTHER; note = 2'-O-methyl modified nucleotide
  modified_base 5: mod_base = OTHER; note = 2'-O-methyl modified nucleotide
  modified_base 6: mod_base = OTHER; note = 2'-O-methyl modified nucleotide
  modified_base 7: mod_base = OTHER; note = 2'-O-methyl modified nucleotide
  modified_base 8: mod_base = OTHER; note = 2'-O-methyl modified nucleotide
  modified_base 9: mod_base = OTHER; note = 2'-O-methyl modified nucleotide
  modified_base 10: mod_base = OTHER; note = 2'-O-methyl modified nucleotide
  modified_base 11: mod_base = OTHER; note = 2'-O-methyl modified nucleotide
  modified_base 12: mod_base = OTHER; note = 2'-O-methyl modified nucleotide
  modified_base 13: mod_base = OTHER; note = 2'-O-methyl modified nucleotide
  modified_base 14: mod_base = OTHER; note = 2'-fluoro modified nucleotide
  modified_base 15: mod_base = OTHER; note = 2'-O-methyl modified nucleotide
  modified_base 16: mod_base = OTHER; note = 2'-O-methyl modified nucleotide
  modified_base 17: mod_base = OTHER; note = 2'-O-methyl modified nucleotide
  modified_base 18: mod_base = OTHER; note = 2'-O-methyl modified nucleotide
  modified_base 19: mod_base = OTHER; note = 2'-O-methyl modified nucleotide
  modified_base 20: mod_base = OTHER; note = 2'-O-methyl modified nucleotide
  modified_base 21: mod_base = OTHER; note = 2'-O-methyl modified nucleotide
  modified_base 22: mod_base = OTHER; note = 2'-fluoro modified nucleotide
  modified_base 23: mod_base = OTHER; note = 2'-fluoro modified nucleotide
  modified_base 24: mod_base = OTHER; note = 2'-fluoro modified nucleotide
  modified_base 25: mod_base = OTHER; note = 2'-O-methyl modified nucleotide
  modified_base 26: mod_base = OTHER; note = 2'-O-methyl modified nucleotide
  modified_base 27: mod_base = OTHER; note = 2'-O-methyl modified nucleotide
  modified_base 28: mod_base = OTHER; note = 2'-O-methyl modified nucleotide
  modified_base 29: mod_base = OTHER; note = 2'-O-methyl modified nucleotide
  modified_base 30: mod_base = OTHER; note = 2'-O-methyl modified nucleotide
  modified_base 31: mod_base = OTHER; note = 2'-O-methyl modified nucleotide
  modified_base 32: mod_base = OTHER; note = 2'-O-methyl modified nucleotide
  modified_base 33: mod_base = OTHER; note = 2'-O-methyl modified nucleotide
  misc_difference 34: note = 2'-O-methyl modified nucleotide may be trivalent N-acetylgalactosamine modified
ncagccagggcagcacttgtgctgccctggctga

SEQ ID NO: 1721 - RNA, 34 nt, synthetic construct
  source 1..34: mol_type = other RNA
  misc_difference 1: note = 2'-O-methyl modified nucleotide may be 5' phosphate modified
  modified_base 2: mod_base = OTHER; note = 2'-fluoro modified nucleotide
  modified_base 3: mod_base = OTHER; note = 2'-O-methyl modified nucleotide
  modified_base 4: mod_base = OTHER; note = 2'-O-methyl modified nucleotide
  modified_base 5: mod_base = OTHER; note = 2'-O-methyl modified nucleotide
  modified_base 6: mod_base = OTHER; note = 2'-O-methyl modified nucleotide
  modified_base 7: mod_base = OTHER; note = 2'-O-methyl modified nucleotide
  modified_base 8: mod_base = OTHER; note = 2'-O-methyl modified nucleotide
  modified_base 9: mod_base = OTHER; note = 2'-O-methyl modified nucleotide
  modified_base 10: mod_base = OTHER; note = 2'-O-methyl modified nucleotide
  modified_base 11: mod_base = OTHER; note = 2'-O-methyl modified nucleotide
  modified_base 12: mod_base = OTHER; note = 2'-O-methyl modified nucleotide
  modified_base 13: mod_base = OTHER; note = 2'-O-methyl modified nucleotide
  modified_base 14: mod_base = OTHER; note = 2'-fluoro modified nucleotide
  modified_base 15: mod_base = OTHER; note = 2'-O-methyl modified nucleotide
  modified_base 16: mod_base = OTHER; note = 2'-O-methyl modified nucleotide
  modified_base 17: mod_base = OTHER; note = 2'-O-methyl modified nucleotide
  modified_base 18: mod_base = OTHER; note = 2'-O-methyl modified nucleotide
  modified_base 19: mod_base = OTHER; note = 2'-O-methyl modified nucleotide
  modified_base 20: mod_base = OTHER; note = 2'-O-methyl modified nucleotide
  modified_base 21: mod_base = OTHER; note = 2'-O-methyl modified nucleotide
  modified_base 22: mod_base = OTHER; note = 2'-fluoro modified nucleotide
  modified_base 23: mod_base = OTHER; note = 2'-fluoro modified nucleotide
  modified_base 24: mod_base = OTHER; note = 2'-fluoro modified nucleotide
  modified_base 25: mod_base = OTHER; note = 2'-O-methyl modified nucleotide
  modified_base 26: mod_base = OTHER; note = 2'-O-methyl modified nucleotide
  modified_base 27: mod_base = OTHER; note = 2'-O-methyl modified nucleotide
  modified_base 28: mod_base = OTHER; note = 2'-O-methyl modified nucleotide
  modified_base 29: mod_base = OTHER; note = 2'-O-methyl modified nucleotide
  modified_base 30: mod_base = OTHER; note = 2'-O-methyl modified nucleotide
  modified_base 31: mod_base = OTHER; note = 2'-O-methyl modified nucleotide
  modified_base 32: mod_base = OTHER; note = 2'-O-methyl modified nucleotide
  modified_base 33: mod_base = OTHER; note = 2'-O-methyl modified nucleotide
  misc_difference 34: note = 2'-O-methyl modified nucleotide may be trivalent N-acetylgalactosamine modified
nctcagtgtccaagctgaagcttggacactgaga

SEQ ID NO: 1722 - RNA, 34 nt, synthetic construct
  source 1..34: mol_type = other RNA
  misc_difference 1: note = 2'-O-methyl modified nucleotide may be 5' phosphate modified
  modified_base 2: mod_base = OTHER; note = 2'-fluoro modified nucleotide
  modified_base 3: mod_base = OTHER; note = 2'-O-methyl modified nucleotide
  modified_base 4: mod_base = OTHER; note = 2'-O-methyl modified nucleotide
  modified_base 5: mod_base = OTHER; note = 2'-O-methyl modified nucleotide
  modified_base 6: mod_base = OTHER; note = 2'-O-methyl modified nucleotide
  modified_base 7: mod_base = OTHER; note = 2'-O-methyl modified nucleotide
  modified_base 8: mod_base = OTHER; note = 2'-O-methyl modified nucleotide
  modified_base 9: mod_base = OTHER; note = 2'-O-methyl modified nucleotide
  modified_base 10: mod_base = OTHER; note = 2'-O-methyl modified nucleotide
  modified_base 11: mod_base = OTHER; note = 2'-O-methyl modified nucleotide
  modified_base 12: mod_base = OTHER; note = 2'-O-methyl modified nucleotide
  modified_base 13: mod_base = OTHER; note = 2'-O-methyl modified nucleotide
  modified_base 14: mod_base = OTHER; note = 2'-fluoro modified nucleotide
  modified_base 15: mod_base = OTHER; note = 2'-O-methyl modified nucleotide
  modified_base 16: mod_base = OTHER; note = 2'-O-methyl modified nucleotide
  modified_base 17: mod_base = OTHER; note = 2'-O-methyl modified nucleotide
  modified_base 18: mod_base = OTHER; note = 2'-O-methyl modified nucleotide
  modified_base 19: mod_base = OTHER; note = 2'-O-methyl modified nucleotide
  modified_base 20: mod_base = OTHER; note = 2'-O-methyl modified nucleotide
  modified_base 21: mod_base = OTHER; note = 2'-O-methyl modified nucleotide
  modified_base 22: mod_base = OTHER; note = 2'-fluoro modified nucleotide
  modified_base 23: mod_base = OTHER; note = 2'-fluoro modified nucleotide
  modified_base 24: mod_base = OTHER; note = 2'-fluoro modified nucleotide
  modified_base 25: mod_base = OTHER; note = 2'-O-methyl modified nucleotide
  modified_base 26: mod_base = OTHER; note = 2'-O-methyl modified nucleotide
  modified_base 27: mod_base = OTHER; note = 2'-O-methyl modified nucleotide
  modified_base 28: mod_base = OTHER; note = 2'-O-methyl modified nucleotide
  modified_base 29: mod_base = OTHER; note = 2'-O-methyl modified nucleotide
  modified_base 30: mod_base = OTHER; note = 2'-O-methyl modified nucleotide
  modified_base 31: mod_base = OTHER; note = 2'-O-methyl modified nucleotide
  modified_base 32: mod_base = OTHER; note = 2'-O-methyl modified nucleotide
  modified_base 33: mod_base = OTHER; note = 2'-O-methyl modified nucleotide
  misc_difference 34: note = 2'-O-methyl modified nucleotide may be trivalent N-acetylgalactosamine modified
ncagagactggctttcatcaaagccagtctctga

SEQ ID NO: 1723 - RNA, 34 nt, synthetic construct
  source 1..34: mol_type = other RNA
  misc_difference 1: note = 2'-O-methyl modified nucleotide may be 5' phosphate modified
  modified_base 2: mod_base = OTHER; note = 2'-fluoro modified nucleotide
  modified_base 3: mod_base = OTHER; note = 2'-O-methyl modified nucleotide
  modified_base 4: mod_base = OTHER; note = 2'-O-methyl modified nucleotide
  modified_base 5: mod_base = OTHER; note = 2'-O-methyl modified nucleotide
  modified_base 6: mod_base = OTHER; note = 2'-O-methyl modified nucleotide
  modified_base 7: mod_base = OTHER; note = 2'-O-methyl modified nucleotide
  modified_base 8: mod_base = OTHER; note = 2'-O-methyl modified nucleotide
  modified_base 9: mod_base = OTHER; note = 2'-O-methyl modified nucleotide
  modified_base 10: mod_base = OTHER; note = 2'-O-methyl modified nucleotide
  modified_base 11: mod_base = OTHER; note = 2'-O-methyl modified nucleotide
  modified_base 12: mod_base = OTHER; note = 2'-O-methyl modified nucleotide
  modified_base 13: mod_base = OTHER; note = 2'-O-methyl modified nucleotide
  modified_base 14: mod_base = OTHER; note = 2'-fluoro modified nucleotide
  modified_base 15: mod_base = OTHER; note = 2'-O-methyl modified nucleotide
  modified_base 16: mod_base = OTHER; note = 2'-O-methyl modified nucleotide
  modified_base 17: mod_base = OTHER; note = 2'-O-methyl modified nucleotide
  modified_base 18: mod_base = OTHER; note = 2'-O-methyl modified nucleotide
  modified_base 19: mod_base = OTHER; note = 2'-O-methyl modified nucleotide
  modified_base 20: mod_base = OTHER; note = 2'-O-methyl modified nucleotide
  modified_base 21: mod_base = OTHER; note = 2'-O-methyl modified nucleotide
  modified_base 22: mod_base = OTHER; note = 2'-fluoro modified nucleotide
  modified_base 23: mod_base = OTHER; note = 2'-fluoro modified nucleotide
  modified_base 24: mod_base = OTHER; note = 2'-fluoro modified nucleotide
  modified_base 25: mod_base = OTHER; note = 2'-O-methyl modified nucleotide
  modified_base 26: mod_base = OTHER; note = 2'-O-methyl modified nucleotide
  modified_base 27: mod_base = OTHER; note = 2'-O-methyl modified nucleotide
  modified_base 28: mod_base = OTHER; note = 2'-O-methyl modified nucleotide
  modified_base 29: mod_base = OTHER; note = 2'-O-methyl modified nucleotide
  modified_base 30: mod_base = OTHER; note = 2'-O-methyl modified nucleotide
  modified_base 31: mod_base = OTHER; note = 2'-O-methyl modified nucleotide
  modified_base 32: mod_base = OTHER; note = 2'-O-methyl modified nucleotide
  modified_base 33: mod_base = OTHER; note = 2'-O-methyl modified nucleotide
  misc_difference 34: note = 2'-O-methyl modified nucleotide may be trivalent N-acetylgalactosamine modified
natccagataatcctccctaggattatctggata

SEQ ID NO: 1724 - RNA, 34 nt, synthetic construct
  source 1..34: mol_type = other RNA
  misc_difference 1: note = 2'-O-methyl modified nucleotide may be 5' phosphate modified
  modified_base 2: mod_base = OTHER; note = 2'-fluoro modified nucleotide
  modified_base 3: mod_base = OTHER; note = 2'-O-methyl modified nucleotide
  modified_base 4: mod_base = OTHER; note = 2'-O-methyl modified nucleotide
  modified_base 5: mod_base = OTHER; note = 2'-O-methyl modified nucleotide
  modified_base 6: mod_base = OTHER; note = 2'-O-methyl modified nucleotide
  modified_base 7: mod_base = OTHER; note = 2'-O-methyl modified nucleotide
  modified_base 8: mod_base = OTHER; note = 2'-O-methyl modified nucleotide
  modified_base 9: mod_base = OTHER; note = 2'-O-methyl modified nucleotide
  modified_base 10: mod_base = OTHER; note = 2'-O-methyl modified nucleotide
  modified_base 11: mod_base = OTHER; note = 2'-O-methyl modified nucleotide
  modified_base 12: mod_base = OTHER; note = 2'-O-methyl modified nucleotide
  modified_base 13: mod_base = OTHER; note = 2'-O-methyl modified nucleotide
  modified_base 14: mod_base = OTHER; note = 2'-fluoro modified nucleotide
  modified_base 15: mod_base = OTHER; note = 2'-O-methyl modified nucleotide
  modified_base 16: mod_base = OTHER; note = 2'-O-methyl modified nucleotide
  modified_base 17: mod_base = OTHER; note = 2'-O-methyl modified nucleotide
  modified_base 18: mod_base = OTHER; note = 2'-O-methyl modified nucleotide
  modified_base 19: mod_base = OTHER; note = 2'-O-methyl modified nucleotide
  modified_base 20: mod_base = OTHER; note = 2'-O-methyl modified nucleotide
  modified_base 21: mod_base = OTHER; note = 2'-O-methyl modified nucleotide
  modified_base 22: mod_base = OTHER; note = 2'-fluoro modified nucleotide
  modified_base 23: mod_base = OTHER; note = 2'-fluoro modified nucleotide
  modified_base 24: mod_base = OTHER; note = 2'-fluoro modified nucleotide
  modified_base 25: mod_base = OTHER; note = 2'-O-methyl modified nucleotide
  modified_base 26: mod_base = OTHER; note = 2'-O-methyl modified nucleotide
  modified_base 27: mod_base = OTHER; note = 2'-O-methyl modified nucleotide
  modified_base 28: mod_base = OTHER; note = 2'-O-methyl modified nucleotide
  modified_base 29: mod_base = OTHER; note = 2'-O-methyl modified nucleotide
  modified_base 30: mod_base = OTHER; note = 2'-O-methyl modified nucleotide
  modified_base 31: mod_base = OTHER; note = 2'-O-methyl modified nucleotide
  modified_base 32: mod_base = OTHER; note = 2'-O-methyl modified nucleotide
  modified_base 33: mod_base = OTHER; note = 2'-O-methyl modified nucleotide
  misc_difference 34: note = 2'-O-methyl modified nucleotide may be trivalent N-acetylgalactosamine modified
ncttctcaattaagttgacacttaattgagaaga

SEQ ID NO: 1725 - RNA, 34 nt, synthetic construct
  source 1..34: mol_type = other RNA
  misc_difference 1: note = 2'-O-methyl modified nucleotide may be 5' phosphate modified
  modified_base 2: mod_base = OTHER; note = 2'-fluoro modified nucleotide
  modified_base 3: mod_base = OTHER; note = 2'-O-methyl modified nucleotide
  modified_base 4: mod_base = OTHER; note = 2'-O-methyl modified nucleotide
  modified_base 5: mod_base = OTHER; note = 2'-O-methyl modified nucleotide
  modified_base 6: mod_base = OTHER; note = 2'-O-methyl modified nucleotide
  modified_base 7: mod_base = OTHER; note = 2'-O-methyl modified nucleotide
  modified_base 8: mod_base = OTHER; note = 2'-O-methyl modified nucleotide
  modified_base 9: mod_base = OTHER; note = 2'-O-methyl modified nucleotide
  modified_base 10: mod_base = OTHER; note = 2'-O-methyl modified nucleotide
  modified_base 11: mod_base = OTHER; note = 2'-O-methyl modified nucleotide
  modified_base 12: mod_base = OTHER; note = 2'-O-methyl modified nucleotide
  modified_base 13: mod_base = OTHER; note = 2'-O-methyl modified nucleotide
  modified_base 14: mod_base = OTHER; note = 2'-fluoro modified nucleotide
  modified_base 15: mod_base = OTHER; note = 2'-O-methyl modified nucleotide
  modified_base 16: mod_base = OTHER; note = 2'-O-methyl modified nucleotide
  modified_base 17: mod_base = OTHER; note = 2'-O-methyl modified nucleotide
  modified_base 18: mod_base = OTHER; note = 2'-O-methyl modified nucleotide
  modified_base 19: mod_base = OTHER; note = 2'-O-methyl modified nucleotide
  modified_base 20: mod_base = OTHER; note = 2'-O-methyl modified nucleotide
  modified_base 21: mod_base = OTHER; note = 2'-O-methyl modified nucleotide
  modified_base 22: mod_base = OTHER; note = 2'-fluoro modified nucleotide
  modified_base 23: mod_base = OTHER; note = 2'-fluoro modified nucleotide
  modified_base 24: mod_base = OTHER; note = 2'-fluoro modified nucleotide
  modified_base 25: mod_base = OTHER; note = 2'-O-methyl modified nucleotide
  modified_base 26: mod_base = OTHER; note = 2'-O-methyl modified nucleotide
  modified_base 27: mod_base = OTHER; note = 2'-O-methyl modified nucleotide
  modified_base 28: mod_base = OTHER; note = 2'-O-methyl modified nucleotide
  modified_base 29: mod_base = OTHER; note = 2'-O-methyl modified nucleotide
  modified_base 30: mod_base = OTHER; note = 2'-O-methyl modified nucleotide
  modified_base 31: mod_base = OTHER; note = 2'-O-methyl modified nucleotide
  modified_base 32: mod_base = OTHER; note = 2'-O-methyl modified nucleotide
  modified_base 33: mod_base = OTHER; note = 2'-O-methyl modified nucleotide
  misc_difference 34: note = 2'-O-methyl modified nucleotide may be trivalent N-acetylgalactosamine modified
nccagacctagacctggtcaggtctaggtctgga

SEQ ID NO: 1726 - RNA, 34 nt, synthetic construct
  source 1..34: mol_type = other RNA
  misc_difference 1: note = 2'-O-methyl modified nucleotide may be 5' phosphate modified
  modified_base 2: mod_base = OTHER; note = 2'-fluoro modified nucleotide
  modified_base 3: mod_base = OTHER; note = 2'-O-methyl modified nucleotide
  modified_base 4: mod_base = OTHER; note = 2'-O-methyl modified nucleotide
  modified_base 5: mod_base = OTHER; note = 2'-O-methyl modified nucleotide
  modified_base 6: mod_base = OTHER; note = 2'-O-methyl modified nucleotide
  modified_base 7: mod_base = OTHER; note = 2'-O-methyl modified nucleotide
  modified_base 8: mod_base = OTHER; note = 2'-O-methyl modified nucleotide
  modified_base 9: mod_base = OTHER; note = 2'-O-methyl modified nucleotide
  modified_base 10: mod_base = OTHER; note = 2'-O-methyl modified nucleotide
  modified_base 11: mod_base = OTHER; note = 2'-O-methyl modified nucleotide
  modified_base 12: mod_base = OTHER; note = 2'-O-methyl modified nucleotide
  modified_base 13: mod_base = OTHER; note = 2'-O-methyl modified nucleotide
  modified_base 14: mod_base = OTHER; note = 2'-fluoro modified nucleotide
  modified_base 15: mod_base = OTHER; note = 2'-O-methyl modified nucleotide
  modified_base 16: mod_base = OTHER; note = 2'-O-methyl modified nucleotide
  modified_base 17: mod_base = OTHER; note = 2'-O-methyl modified nucleotide
  modified_base 18: mod_base = OTHER; note = 2'-O-methyl modified nucleotide
  modified_base 19: mod_base = OTHER; note = 2'-O-methyl modified nucleotide
  modified_base 20: mod_base = OTHER; note = 2'-O-methyl modified nucleotide
  modified_base 21: mod_base = OTHER; note = 2'-O-methyl modified nucleotide
  modified_base 22: mod_base = OTHER; note = 2'-fluoro modified nucleotide
  modified_base 23: mod_base = OTHER; note = 2'-fluoro modified nucleotide
  modified_base 24: mod_base = OTHER; note = 2'-fluoro modified nucleotide
  modified_base 25: mod_base = OTHER; note = 2'-O-methyl modified nucleotide
  modified_base 26: mod_base = OTHER; note = 2'-O-methyl modified nucleotide
  modified_base 27: mod_base = OTHER; note = 2'-O-methyl modified nucleotide
  modified_base 28: mod_base = OTHER; note = 2'-O-methyl modified nucleotide
  modified_base 29: mod_base = OTHER; note = 2'-O-methyl modified nucleotide
  modified_base 30: mod_base = OTHER; note = 2'-O-methyl modified nucleotide
  modified_base 31: mod_base = OTHER; note = 2'-O-methyl modified nucleotide
  modified_base 32: mod_base = OTHER; note = 2'-O-methyl modified nucleotide
  modified_base 33: mod_base = OTHER; note = 2'-O-methyl modified nucleotide
  misc_difference 34: note = 2'-O-methyl modified nucleotide may be trivalent N-acetylgalactosamine modified
ncaacgtcatagtcataaatgactatgacgttga

SEQ ID NO: 1727 - RNA, 34 nt, synthetic construct
  source 1..34: mol_type = other RNA
  misc_difference 1: note = 2'-O-methyl modified nucleotide may be 5' phosphate modified
  modified_base 2: mod_base = OTHER; note = 2'-fluoro modified nucleotide
  modified_base 3: mod_base = OTHER; note = 2'-O-methyl modified nucleotide
  modified_base 4: mod_base = OTHER; note = 2'-O-methyl modified nucleotide
  modified_base 5: mod_base = OTHER; note = 2'-O-methyl modified nucleotide
  modified_base 6: mod_base = OTHER; note = 2'-O-methyl modified nucleotide
  modified_base 7: mod_base = OTHER; note = 2'-O-methyl modified nucleotide
  modified_base 8: mod_base = OTHER; note = 2'-O-methyl modified nucleotide
  modified_base 9: mod_base = OTHER; note = 2'-O-methyl modified nucleotide
  modified_base 10: mod_base = OTHER; note = 2'-O-methyl modified nucleotide
  modified_base 11: mod_base = OTHER; note = 2'-O-methyl modified nucleotide
  modified_base 12: mod_base = OTHER; note = 2'-O-methyl modified nucleotide
  modified_base 13: mod_base = OTHER; note = 2'-O-methyl modified nucleotide
  modified_base 14: mod_base = OTHER; note = 2'-fluoro modified nucleotide
  modified_base 15: mod_base = OTHER; note = 2'-O-methyl modified nucleotide
  modified_base 16: mod_base = OTHER; note = 2'-O-methyl modified nucleotide
  modified_base 17: mod_base = OTHER; note = 2'-O-methyl modified nucleotide
  modified_base 18: mod_base = OTHER; note = 2'-O-methyl modified nucleotide
  modified_base 19: mod_base = OTHER; note = 2'-O-methyl modified nucleotide
  modified_base 20: mod_base = OTHER; note = 2'-O-methyl modified nucleotide
  modified_base 21: mod_base = OTHER; note = 2'-O-methyl modified nucleotide
  modified_base 22: mod_base = OTHER; note = 2'-fluoro modified nucleotide
  modified_base 23: mod_base = OTHER; note = 2'-fluoro modified nucleotide
  modified_base 24: mod_base = OTHER; note = 2'-fluoro modified nucleotide
  modified_base 25: mod_base = OTHER; note = 2'-O-methyl modified nucleotide
  modified_base 26: mod_base = OTHER; note = 2'-O-methyl modified nucleotide
  modified_base 27: mod_base = OTHER; note = 2'-O-methyl modified nucleotide
  modified_base 28: mod_base = OTHER; note = 2'-O-methyl modified nucleotide
  modified_base 29: mod_base = OTHER; note = 2'-O-methyl modified nucleotide
  modified_base 30: mod_base = OTHER; note = 2'-O-methyl modified nucleotide
  modified_base 31: mod_base = OTHER; note = 2'-O-methyl modified nucleotide
  modified_base 32: mod_base = OTHER; note = 2'-O-methyl modified nucleotide
  modified_base 33: mod_base = OTHER; note = 2'-O-methyl modified nucleotide
  misc_difference 34: note = 2'-O-methyl modified nucleotide may be trivalent N-acetylgalactosamine modified
nttgaatgaaacgacttctgtcgtttcattcaaa

SEQ ID NO: 1728 - RNA, 34 nt, synthetic construct
  source 1..34: mol_type = other RNA
  misc_difference 1: note = 2'-O-methyl modified nucleotide may be 5' phosphate modified
  modified_base 2: mod_base = OTHER; note = 2'-fluoro modified nucleotide
  modified_base 3: mod_base = OTHER; note = 2'-O-methyl modified nucleotide
  modified_base 4: mod_base = OTHER; note = 2'-O-methyl modified nucleotide
  modified_base 5: mod_base = OTHER; note = 2'-O-methyl modified nucleotide
  modified_base 6: mod_base = OTHER; note = 2'-O-methyl modified nucleotide
  modified_base 7: mod_base = OTHER; note = 2'-O-methyl modified nucleotide
  modified_base 8: mod_base = OTHER; note = 2'-O-methyl modified nucleotide
  modified_base 9: mod_base = OTHER; note = 2'-O-methyl modified nucleotide
  modified_base 10: mod_base = OTHER; note = 2'-O-methyl modified nucleotide
  modified_base 11: mod_base = OTHER; note = 2'-O-methyl modified nucleotide
  modified_base 12: mod_base = OTHER; note = 2'-O-methyl modified nucleotide
  modified_base 13: mod_base = OTHER; note = 2'-O-methyl modified nucleotide
  modified_base 14: mod_base = OTHER; note = 2'-fluoro modified nucleotide
  modified_base 15: mod_base = OTHER; note = 2'-O-methyl modified nucleotide
  modified_base 16: mod_base = OTHER; note = 2'-O-methyl modified nucleotide
  modified_base 17: mod_base = OTHER; note = 2'-O-methyl modified nucleotide
  modified_base 18: mod_base = OTHER; note = 2'-O-methyl modified nucleotide
  modified_base 19: mod_base = OTHER; note = 2'-O-methyl modified nucleotide
  modified_base 20: mod_base = OTHER; note = 2'-O-methyl modified nucleotide
  modified_base 21: mod_base = OTHER; note = 2'-O-methyl modified nucleotide
  modified_base 22: mod_base = OTHER; note = 2'-fluoro modified nucleotide
  modified_base 23: mod_base = OTHER; note = 2'-fluoro modified nucleotide
  modified_base 24: mod_base = OTHER; note = 2'-fluoro modified nucleotide
  modified_base 25: mod_base = OTHER; note = 2'-O-methyl modified nucleotide
  modified_base 26: mod_base = OTHER; note = 2'-O-methyl modified nucleotide
  modified_base 27: mod_base = OTHER; note = 2'-O-methyl modified nucleotide
  modified_base 28: mod_base = OTHER; note = 2'-O-methyl modified nucleotide
  modified_base 29: mod_base = OTHER; note = 2'-O-methyl modified nucleotide
  modified_base 30: mod_base = OTHER; note = 2'-O-methyl modified nucleotide
  modified_base 31: mod_base = OTHER; note = 2'-O-methyl modified nucleotide
  modified_base 32: mod_base = OTHER; note = 2'-O-methyl modified nucleotide
  modified_base 33: mod_base = OTHER; note = 2'-O-methyl modified nucleotide
  misc_difference 34: note = 2'-O-methyl modified nucleotide may be trivalent N-acetylgalactosamine modified
ncctcctcagacacaaacatgtgtctgaggagga

SEQ ID NO: 1729 - RNA, 34 nt, synthetic construct
  source 1..34: mol_type = other RNA
  misc_difference 1: note = 2'-O-methyl modified nucleotide may be 5' phosphate modified
  modified_base 2: mod_base = OTHER; note = 2'-fluoro modified nucleotide
  modified_base 3: mod_base = OTHER; note = 2'-O-methyl modified nucleotide
  modified_base 4: mod_base = OTHER; note = 2'-O-methyl modified nucleotide
  modified_base 5: mod_base = OTHER; note = 2'-O-methyl modified nucleotide
  modified_base 6: mod_base = OTHER; note = 2'-O-methyl modified nucleotide
  modified_base 7: mod_base = OTHER; note = 2'-O-methyl modified nucleotide
  modified_base 8: mod_base = OTHER; note = 2'-O-methyl modified nucleotide
  modified_base 9: mod_base = OTHER; note = 2'-O-methyl modified nucleotide
  modified_base 10: mod_base = OTHER; note = 2'-O-methyl modified nucleotide
  modified_base 11: mod_base = OTHER; note = 2'-O-methyl modified nucleotide
  modified_base 12: mod_base = OTHER; note = 2'-O-methyl modified nucleotide
  modified_base 13: mod_base = OTHER; note = 2'-O-methyl modified nucleotide
  modified_base 14: mod_base = OTHER; note = 2'-fluoro modified nucleotide
  modified_base 15: mod_base = OTHER; note = 2'-O-methyl modified nucleotide
  modified_base 16: mod_base = OTHER; note = 2'-O-methyl modified nucleotide
  modified_base 17: mod_base = OTHER; note = 2'-O-methyl modified nucleotide
  modified_base 18: mod_base = OTHER; note = 2'-O-methyl modified nucleotide
  modified_base 19: mod_base = OTHER; note = 2'-O-methyl modified nucleotide
  modified_base 20: mod_base = OTHER; note = 2'-O-methyl modified nucleotide
  modified_base 21: mod_base = OTHER; note = 2'-O-methyl modified nucleotide
  modified_base 22: mod_base = OTHER; note = 2'-fluoro modified nucleotide
  modified_base 23: mod_base = OTHER; note = 2'-fluoro modified nucleotide
  modified_base 24: mod_base = OTHER; note = 2'-fluoro modified nucleotide
  modified_base 25: mod_base = OTHER; note = 2'-O-methyl modified nucleotide
  modified_base 26: mod_base = OTHER; note = 2'-O-methyl modified nucleotide
  modified_base 27: mod_base = OTHER; note = 2'-O-methyl modified nucleotide
  modified_base 28: mod_base = OTHER; note = 2'-O-methyl modified nucleotide
  modified_base 29: mod_base = OTHER; note = 2'-O-methyl modified nucleotide
  modified_base 30: mod_base = OTHER; note = 2'-O-methyl modified nucleotide
  modified_base 31: mod_base = OTHER; note = 2'-O-methyl modified nucleotide
  modified_base 32: mod_base = OTHER; note = 2'-O-methyl modified nucleotide
  modified_base 33: mod_base = OTHER; note = 2'-O-methyl modified nucleotide
  misc_difference 34: note = 2'-O-methyl modified nucleotide may be trivalent N-acetylgalactosamine modified
naagccaaagcattgatgtcaatgctttggctta

SEQ ID NO: 1730 - RNA, 34 nt, synthetic construct
  source 1..34: mol_type = other RNA
  misc_difference 1: note = 2'-O-methyl modified nucleotide may be 5' phosphate modified
  modified_base 2: mod_base = OTHER; note = 2'-fluoro modified nucleotide
  modified_base 3: mod_base = OTHER; note = 2'-O-methyl modified nucleotide
  modified_base 4: mod_base = OTHER; note = 2'-O-methyl modified nucleotide
  modified_base 5: mod_base = OTHER; note = 2'-O-methyl modified nucleotide
  modified_base 6: mod_base = OTHER; note = 2'-O-methyl modified nucleotide
  modified_base 7: mod_base = OTHER; note = 2'-O-methyl modified nucleotide
  modified_base 8: mod_base = OTHER; note = 2'-O-methyl modified nucleotide
  modified_base 9: mod_base = OTHER; note = 2'-O-methyl modified nucleotide
  modified_base 10: mod_base = OTHER; note = 2'-O-methyl modified nucleotide
  modified_base 11: mod_base = OTHER; note = 2'-O-methyl modified nucleotide
  modified_base 12: mod_base = OTHER; note = 2'-O-methyl modified nucleotide
  modified_base 13: mod_base = OTHER; note = 2'-O-methyl modified nucleotide
  modified_base 14: mod_base = OTHER; note = 2'-fluoro modified nucleotide
  modified_base 15: mod_base = OTHER; note = 2'-O-methyl modified nucleotide
  modified_base 16: mod_base = OTHER; note = 2'-O-methyl modified nucleotide
  modified_base 17: mod_base = OTHER; note = 2'-O-methyl modified nucleotide
  modified_base 18: mod_base = OTHER; note = 2'-O-methyl modified nucleotide
  modified_base 19: mod_base = OTHER; note = 2'-O-methyl modified nucleotide
  modified_base 20: mod_base = OTHER; note = 2'-O-methyl modified nucleotide
  modified_base 21: mod_base = OTHER; note = 2'-O-methyl modified nucleotide
  modified_base 22: mod_base = OTHER; note = 2'-fluoro modified nucleotide
  modified_base 23: mod_base = OTHER; note = 2'-fluoro modified nucleotide
  modified_base 24: mod_base = OTHER; note = 2'-fluoro modified nucleotide
  modified_base 25: mod_base = OTHER; note = 2'-O-methyl modified nucleotide
  modified_base 26: mod_base = OTHER; note = 2'-O-methyl modified nucleotide
  modified_base 27: mod_base = OTHER; note = 2'-O-methyl modified nucleotide
  modified_base 28: mod_base = OTHER; note = 2'-O-methyl modified nucleotide
  modified_base 29: mod_base = OTHER; note = 2'-O-methyl modified nucleotide
  modified_base 30: mod_base = OTHER; note = 2'-O-methyl modified nucleotide
  modified_base 31: mod_base = OTHER; note = 2'-O-methyl modified nucleotide
  modified_base 32: mod_base = OTHER; note = 2'-O-methyl modified nucleotide
  modified_base 33: mod_base = OTHER; note = 2'-O-methyl modified nucleotide
  misc_difference 34: note = 2'-O-methyl modified nucleotide may be trivalent N-acetylgalactosamine modified
ntgaaacgacttctcttgtgagaagtcgtttcaa

SEQ ID NO: 1731 - RNA, 34 nt, synthetic construct
  source 1..34: mol_type = other RNA
  misc_difference 1: note = 2'-O-methyl modified nucleotide may be 5' phosphate modified
  modified_base 2: mod_base = OTHER; note = 2'-fluoro modified nucleotide
  modified_base 3: mod_base = OTHER; note = 2'-O-methyl modified nucleotide
  modified_base 4: mod_base = OTHER; note = 2'-O-methyl modified nucleotide
  modified_base 5: mod_base = OTHER; note = 2'-O-methyl modified nucleotide
  modified_base 6: mod_base = OTHER; note = 2'-O-methyl modified nucleotide
  modified_base 7: mod_base = OTHER; note = 2'-O-methyl modified nucleotide
  modified_base 8: mod_base = OTHER; note = 2'-O-methyl modified nucleotide
  modified_base 9: mod_base = OTHER; note = 2'-O-methyl modified nucleotide
  modified_base 10: mod_base = OTHER; note = 2'-O-methyl modified nucleotide
  modified_base 11: mod_base = OTHER; note = 2'-O-methyl modified nucleotide
  modified_base 12: mod_base = OTHER; note = 2'-O-methyl modified nucleotide
  modified_base 13: mod_base = OTHER; note = 2'-O-methyl modified nucleotide
  modified_base 14: mod_base = OTHER; note = 2'-fluoro modified nucleotide
  modified_base 15: mod_base = OTHER; note = 2'-O-methyl modified nucleotide
  modified_base 16: mod_base = OTHER; note = 2'-O-methyl modified nucleotide
  modified_base 17: mod_base = OTHER; note = 2'-O-methyl modified nucleotide
  modified_base 18: mod_base = OTHER; note = 2'-O-methyl modified nucleotide
  modified_base 19: mod_base = OTHER; note = 2'-O-methyl modified nucleotide
  modified_base 20: mod_base = OTHER; note = 2'-O-methyl modified nucleotide
  modified_base 21: mod_base = OTHER; note = 2'-O-methyl modified nucleotide
  modified_base 22: mod_base = OTHER; note = 2'-fluoro modified nucleotide
  modified_base 23: mod_base = OTHER; note = 2'-fluoro modified nucleotide
  modified_base 24: mod_base = OTHER; note = 2'-fluoro modified nucleotide
  modified_base 25: mod_base = OTHER; note = 2'-O-methyl modified nucleotide
  modified_base 26: mod_base = OTHER; note = 2'-O-methyl modified nucleotide
  modified_base 27: mod_base = OTHER; note = 2'-O-methyl modified nucleotide
  modified_base 28: mod_base = OTHER; note = 2'-O-methyl modified nucleotide
  modified_base 29: mod_base = OTHER; note = 2'-O-methyl modified nucleotide
  modified_base 30: mod_base = OTHER; note = 2'-O-methyl modified nucleotide
  modified_base 31: mod_base = OTHER; note = 2'-O-methyl modified nucleotide
  modified_base 32: mod_base = OTHER; note = 2'-O-methyl modified nucleotide
  modified_base 33: mod_base = OTHER; note = 2'-O-methyl modified nucleotide
  misc_difference 34: note = 2'-O-methyl modified nucleotide may be trivalent N-acetylgalactosamine modified
naacttgtggtcttcataagaagaccacaagtta

SEQ ID NO: 1732 - RNA, 34 nt, synthetic construct
  source 1..34: mol_type = other RNA
  misc_difference 1: note = 2'-O-methyl modified nucleotide may be 5' phosphate modified
  modified_base 2: mod_base = OTHER; note = 2'-fluoro modified nucleotide
  modified_base 3: mod_base = OTHER; note = 2'-O-methyl modified nucleotide
  modified_base 4: mod_base = OTHER; note = 2'-O-methyl modified nucleotide
  modified_base 5: mod_base = OTHER; note = 2'-O-methyl modified nucleotide
  modified_base 6: mod_base = OTHER; note = 2'-O-methyl modified nucleotide
  modified_base 7: mod_base = OTHER; note = 2'-O-methyl modified nucleotide
  modified_base 8: mod_base = OTHER; note = 2'-O-methyl modified nucleotide
  modified_base 9: mod_base = OTHER; note = 2'-O-methyl modified nucleotide
  modified_base 10: mod_base = OTHER; note = 2'-O-methyl modified nucleotide
  modified_base 11: mod_base = OTHER; note = 2'-O-methyl modified nucleotide
  modified_base 12: mod_base = OTHER; note = 2'-O-methyl modified nucleotide
  modified_base 13: mod_base = OTHER; note = 2'-O-methyl modified nucleotide
  modified_base 14: mod_base = OTHER; note = 2'-fluoro modified nucleotide
  modified_base 15: mod_base = OTHER; note = 2'-O-methyl modified nucleotide
  modified_base 16: mod_base = OTHER; note = 2'-O-methyl modified nucleotide
  modified_base 17: mod_base = OTHER; note = 2'-O-methyl modified nucleotide
  modified_base 18: mod_base = OTHER; note = 2'-O-methyl modified nucleotide
  modified_base 19: mod_base = OTHER; note = 2'-O-methyl modified nucleotide
  modified_base 20: mod_base = OTHER; note = 2'-O-methyl modified nucleotide
  modified_base 21: mod_base = OTHER; note = 2'-O-methyl modified nucleotide
  modified_base 22: mod_base = OTHER; note = 2'-fluoro modified nucleotide
  modified_base 23: mod_base = OTHER; note = 2'-fluoro modified nucleotide
  modified_base 24: mod_base = OTHER; note = 2'-fluoro modified nucleotide
  modified_base 25: mod_base = OTHER; note = 2'-O-methyl modified nucleotide
  modified_base 26: mod_base = OTHER; note = 2'-O-methyl modified nucleotide
  modified_base 27: mod_base = OTHER; note = 2'-O-methyl modified nucleotide
  modified_base 28: mod_base = OTHER; note = 2'-O-methyl modified nucleotide
  modified_base 29: mod_base = OTHER; note = 2'-O-methyl modified nucleotide
  modified_base 30: mod_base = OTHER; note = 2'-O-methyl modified nucleotide
  modified_base 31: mod_base = OTHER; note = 2'-O-methyl modified nucleotide
  modified_base 32: mod_base = OTHER; note = 2'-O-methyl modified nucleotide
  modified_base 33: mod_base = OTHER; note = 2'-O-methyl modified nucleotide
  misc_difference 34: note = 2'-O-methyl modified nucleotide may be trivalent N-acetylgalactosamine modified
nccaggtagatgttcatgggaacatctacctgga

SEQ ID NO: 1733 - RNA, 34 nt, synthetic construct
  source 1..34: mol_type = other RNA
  misc_difference 1: note = 2'-O-methyl modified nucleotide may be 5' phosphate modified
  modified_base 2: mod_base = OTHER; note = 2'-fluoro modified nucleotide
  modified_base 3: mod_base = OTHER; note = 2'-O-methyl modified nucleotide
  modified_base 4: mod_base = OTHER; note = 2'-O-methyl modified nucleotide
  modified_base 5: mod_base = OTHER; note = 2'-O-methyl modified nucleotide
  modified_base 6: mod_base = OTHER; note = 2'-O-methyl modified nucleotide
  modified_base 7: mod_base = OTHER; note = 2'-O-methyl modified nucleotide
  modified_base 8: mod_base = OTHER; note = 2'-O-methyl modified nucleotide
  modified_base 9: mod_base = OTHER; note = 2'-O-methyl modified nucleotide
  modified_base 10: mod_base = OTHER; note = 2'-O-methyl modified nucleotide
  modified_base 11: mod_base = OTHER; note = 2'-O-methyl modified nucleotide
  modified_base 12: mod_base = OTHER; note = 2'-O-methyl modified nucleotide
  modified_base 13: mod_base = OTHER; note = 2'-O-methyl modified nucleotide
  modified_base 14: mod_base = OTHER; note = 2'-fluoro modified nucleotide
  modified_base 15: mod_base = OTHER; note = 2'-O-methyl modified nucleotide
  modified_base 16: mod_base = OTHER; note = 2'-O-methyl modified nucleotide
  modified_base 17: mod_base = OTHER; note = 2'-O-methyl modified nucleotide
  modified_base 18: mod_base = OTHER; note = 2'-O-methyl modified nucleotide
  modified_base 19: mod_base = OTHER; note = 2'-O-methyl modified nucleotide
  modified_base 20: mod_base = OTHER; note = 2'-O-methyl modified nucleotide
  modified_base 21: mod_base = OTHER; note = 2'-O-methyl modified nucleotide
  modified_base 22: mod_base = OTHER; note = 2'-fluoro modified nucleotide
  modified_base 23: mod_base = OTHER; note = 2'-fluoro modified nucleotide
  modified_base 24: mod_base = OTHER; note = 2'-fluoro modified nucleotide
  modified_base 25: mod_base = OTHER; note = 2'-O-methyl modified nucleotide
  modified_base 26: mod_base = OTHER; note = 2'-O-methyl modified nucleotide
  modified_base 27: mod_base = OTHER; note = 2'-O-methyl modified nucleotide
  modified_base 28: mod_base = OTHER; note = 2'-O-methyl modified nucleotide
  modified_base 29: mod_base = OTHER; note = 2'-O-methyl modified nucleotide
  modified_base 30: mod_base = OTHER; note = 2'-O-methyl modified nucleotide
  modified_base 31: mod_base = OTHER; note = 2'-O-methyl modified nucleotide
  modified_base 32: mod_base = OTHER; note = 2'-O-methyl modified nucleotide
  modified_base 33: mod_base = OTHER; note = 2'-O-methyl modified nucleotide
  misc_difference 34: note = 2'-O-methyl modified nucleotide may be trivalent N-acetylgalactosamine modified
nctgtgttctggcacctgcgtgccagaacacaga

SEQ ID NO: 1734 - RNA, 34 nt, synthetic construct
  source 1..34: mol_type = other RNA
  misc_difference 1: note = 2'-O-methyl modified nucleotide may be 5' phosphate modified
  modified_base 2: mod_base = OTHER; note = 2'-fluoro modified nucleotide
  modified_base 3: mod_base = OTHER; note = 2'-O-methyl modified nucleotide
  modified_base 4: mod_base = OTHER; note = 2'-O-methyl modified nucleotide
  modified_base 5: mod_base = OTHER; note = 2'-O-methyl modified nucleotide
  modified_base 6: mod_base = OTHER; note = 2'-O-methyl modified nucleotide
  modified_base 7: mod_base = OTHER; note = 2'-O-methyl modified nucleotide
  modified_base 8: mod_base = OTHER; note = 2'-O-methyl modified nucleotide
  modified_base 9: mod_base = OTHER; note = 2'-O-methyl modified nucleotide
  modified_base 10: mod_base = OTHER; note = 2'-O-methyl modified nucleotide
  modified_base 11: mod_base = OTHER; note = 2'-O-methyl modified nucleotide
  modified_base 12: mod_base = OTHER; note = 2'-O-methyl modified nucleotide
  modified_base 13: mod_base = OTHER; note = 2'-O-methyl modified nucleotide
  modified_base 14: mod_base = OTHER; note = 2'-fluoro modified nucleotide
  modified_base 15: mod_base = OTHER; note = 2'-O-methyl modified nucleotide
  modified_base 16: mod_base = OTHER; note = 2'-O-methyl modified nucleotide
  modified_base 17: mod_base = OTHER; note = 2'-O-methyl modified nucleotide
  modified_base 18: mod_base = OTHER; note = 2'-O-methyl modified nucleotide
  modified_base 19: mod_base = OTHER; note = 2'-O-methyl modified nucleotide
  modified_base 20: mod_base = OTHER; note = 2'-O-methyl modified nucleotide
  modified_base 21: mod_base = OTHER; note = 2'-O-methyl modified nucleotide
  modified_base 22: mod_base = OTHER; note = 2'-fluoro modified nucleotide
  modified_base 23: mod_base = OTHER; note = 2'-fluoro modified nucleotide
  modified_base 24: mod_base = OTHER; note = 2'-fluoro modified nucleotide
  modified_base 25: mod_base = OTHER; note = 2'-O-methyl modified nucleotide
  modified_base 26: mod_base = OTHER; note = 2'-O-methyl modified nucleotide
  modified_base 27: mod_base = OTHER; note = 2'-O-methyl modified nucleotide
  modified_base 28: mod_base = OTHER; note = 2'-O-methyl modified nucleotide
  modified_base 29: mod_base = OTHER; note = 2'-O-methyl modified nucleotide
  modified_base 30: mod_base = OTHER; note = 2'-O-methyl modified nucleotide
  modified_base 31: mod_base = OTHER; note = 2'-O-methyl modified nucleotide
  modified_base 32: mod_base = OTHER; note = 2'-O-methyl modified nucleotide
  modified_base 33: mod_base = OTHER; note = 2'-O-methyl modified nucleotide
  misc_difference 34: note = 2'-O-methyl modified nucleotide may be trivalent N-acetylgalactosamine modified
naacttgccaccttctcaagaaggtggcaagtta

SEQ ID NO: 1735 - RNA, 34 nt, synthetic construct
  source 1..34: mol_type = other RNA
  misc_difference 1: note = 2'-O-methyl modified nucleotide may be 5' phosphate modified
  modified_base 2: mod_base = OTHER; note = 2'-fluoro modified nucleotide
  modified_base 3: mod_base = OTHER; note = 2'-O-methyl modified nucleotide
  modified_base 4: mod_base = OTHER; note = 2'-O-methyl modified nucleotide
  modified_base 5: mod_base = OTHER; note = 2'-O-methyl modified nucleotide
  modified_base 6: mod_base = OTHER; note = 2'-O-methyl modified nucleotide
  modified_base 7: mod_base = OTHER; note = 2'-O-methyl modified nucleotide
  modified_base 8: mod_base = OTHER; note = 2'-O-methyl modified nucleotide
  modified_base 9: mod_base = OTHER; note = 2'-O-methyl modified nucleotide
  modified_base 10: mod_base = OTHER; note = 2'-O-methyl modified nucleotide
  modified_base 11: mod_base = OTHER; note = 2'-O-methyl modified nucleotide
  modified_base 12: mod_base = OTHER; note = 2'-O-methyl modified nucleotide
  modified_base 13: mod_base = OTHER; note = 2'-O-methyl modified nucleotide
  modified_base 14: mod_base = OTHER; note = 2'-fluoro modified nucleotide
  modified_base 15: mod_base = OTHER; note = 2'-O-methyl modified nucleotide
  modified_base 16: mod_base = OTHER; note = 2'-O-methyl modified nucleotide
  modified_base 17: mod_base = OTHER; note = 2'-O-methyl modified nucleotide
  modified_base 18: mod_base = OTHER; note = 2'-O-methyl modified nucleotide
  modified_base 19: mod_base = OTHER; note = 2'-O-methyl modified nucleotide
  modified_base 20: mod_base = OTHER; note = 2'-O-methyl modified nucleotide
  modified_base 21: mod_base = OTHER; note = 2'-O-methyl modified nucleotide
  modified_base 22: mod_base = OTHER; note = 2'-fluoro modified nucleotide
  modified_base 23: mod_base = OTHER; note = 2'-fluoro modified nucleotide
  modified_base 24: mod_base = OTHER; note = 2'-fluoro modified nucleotide
  modified_base 25: mod_base = OTHER; note = 2'-O-methyl modified nucleotide
  modified_base 26: mod_base = OTHER; note = 2'-O-methyl modified nucleotide
  modified_base 27: mod_base = OTHER; note = 2'-O-methyl modified nucleotide
  modified_base 28: mod_base = OTHER; note = 2'-O-methyl modified nucleotide
  modified_base 29: mod_base = OTHER; note = 2'-O-methyl modified nucleotide
  modified_base 30: mod_base = OTHER; note = 2'-O-methyl modified nucleotide
  modified_base 31: mod_base = OTHER; note = 2'-O-methyl modified nucleotide
  modified_base 32: mod_base = OTHER; note = 2'-O-methyl modified nucleotide
  modified_base 33: mod_base = OTHER; note = 2'-O-methyl modified nucleotide
  misc_difference 34: note = 2'-O-methyl modified nucleotide may be trivalent N-acetylgalactosamine modified
ngccatggttgcttgtggtcaagcaaccatggca

SEQ ID NO: 1736 - RNA, 34 nt, synthetic construct
  source 1..34: mol_type = other RNA
  misc_difference 1: note = 2'-O-methyl modified nucleotide may be 5' phosphate modified
  modified_base 2: mod_base = OTHER; note = 2'-fluoro modified nucleotide
  modified_base 3: mod_base = OTHER; note = 2'-O-methyl modified nucleotide
  modified_base 4: mod_base = OTHER; note = 2'-O-methyl modified nucleotide
  modified_base 5: mod_base = OTHER; note = 2'-O-methyl modified nucleotide
  modified_base 6: mod_base = OTHER; note = 2'-O-methyl modified nucleotide
  modified_base 7: mod_base = OTHER; note = 2'-O-methyl modified nucleotide
  modified_base 8: mod_base = OTHER; note = 2'-O-methyl modified nucleotide
  modified_base 9: mod_base = OTHER; note = 2'-O-methyl modified nucleotide
  modified_base 10: mod_base = OTHER; note = 2'-O-methyl modified nucleotide
  modified_base 11: mod_base = OTHER; note = 2'-O-methyl modified nucleotide
  modified_base 12: mod_base = OTHER; note = 2'-O-methyl modified nucleotide
  modified_base 13: mod_base = OTHER; note = 2'-O-methyl modified nucleotide
  modified_base 14: mod_base = OTHER; note = 2'-fluoro modified nucleotide
  modified_base 15: mod_base = OTHER; note = 2'-O-methyl modified nucleotide
  modified_base 16: mod_base = OTHER; note = 2'-O-methyl modified nucleotide
  modified_base 17: mod_base = OTHER; note = 2'-O-methyl modified nucleotide
  modified_base 18: mod_base = OTHER; note = 2'-O-methyl modified nucleotide
  modified_base 19: mod_base = OTHER; note = 2'-O-methyl modified nucleotide
  modified_base 20: mod_base = OTHER; note = 2'-O-methyl modified nucleotide
  modified_base 21: mod_base = OTHER; note = 2'-O-methyl modified nucleotide
  modified_base 22: mod_base = OTHER; note = 2'-fluoro modified nucleotide
  modified_base 23: mod_base = OTHER; note = 2'-fluoro modified nucleotide
  modified_base 24: mod_base = OTHER; note = 2'-fluoro modified nucleotide
  modified_base 25: mod_base = OTHER; note = 2'-O-methyl modified nucleotide
  modified_base 26: mod_base = OTHER; note = 2'-O-methyl modified nucleotide
  modified_base 27: mod_base = OTHER; note = 2'-O-methyl modified nucleotide
  modified_base 28: mod_base = OTHER; note = 2'-O-methyl modified nucleotide
  modified_base 29: mod_base = OTHER; note = 2'-O-methyl modified nucleotide
  modified_base 30: mod_base = OTHER; note = 2'-O-methyl modified nucleotide
  modified_base 31: mod_base = OTHER; note = 2'-O-methyl modified nucleotide
  modified_base 32: mod_base = OTHER; note = 2'-O-methyl modified nucleotide
  modified_base 33: mod_base = OTHER; note = 2'-O-methyl modified nucleotide
  misc_difference 34: note = 2'-O-methyl modified nucleotide may be trivalent N-acetylgalactosamine modified
ngacaaatgggcctgatagcaggcccatttgtca

SEQ ID NO: 1737 - RNA, 34 nt, synthetic construct
  source 1..34: mol_type = other RNA
  misc_difference 1: note = 2'-O-methyl modified nucleotide may be 5' phosphate modified
  modified_base 2: mod_base = OTHER; note = 2'-fluoro modified nucleotide
  modified_base 3: mod_base = OTHER; note = 2'-O-methyl modified nucleotide
  modified_base 4: mod_base = OTHER; note = 2'-O-methyl modified nucleotide
  modified_base 5: mod_base = OTHER; note = 2'-O-methyl modified nucleotide
  modified_base 6: mod_base = OTHER; note = 2'-O-methyl modified nucleotide
  modified_base 7: mod_base = OTHER; note = 2'-O-methyl modified nucleotide
  modified_base 8: mod_base = OTHER; note = 2'-O-methyl modified nucleotide
  modified_base 9: mod_base = OTHER; note = 2'-O-methyl modified nucleotide
  modified_base 10: mod_base = OTHER; note = 2'-O-methyl modified nucleotide
  modified_base 11: mod_base = OTHER; note = 2'-O-methyl modified nucleotide
  modified_base 12: mod_base = OTHER; note = 2'-O-methyl modified nucleotide
  modified_base 13: mod_base = OTHER; note = 2'-O-methyl modified nucleotide
  modified_base 14: mod_base = OTHER; note = 2'-fluoro modified nucleotide
  modified_base 15: mod_base = OTHER; note = 2'-O-methyl modified nucleotide
  modified_base 16: mod_base = OTHER; note = 2'-O-methyl modified nucleotide
  modified_base 17: mod_base = OTHER; note = 2'-O-methyl modified nucleotide
  modified_base 18: mod_base = OTHER; note = 2'-O-methyl modified nucleotide
  modified_base 19: mod_base = OTHER; note = 2'-O-methyl modified nucleotide
  modified_base 20: mod_base = OTHER; note = 2'-O-methyl modified nucleotide
  modified_base 21: mod_base = OTHER; note = 2'-O-methyl modified nucleotide
  modified_base 22: mod_base = OTHER; note = 2'-fluoro modified nucleotide
  modified_base 23: mod_base = OTHER; note = 2'-fluoro modified nucleotide
  modified_base 24: mod_base = OTHER; note = 2'-fluoro modified nucleotide
  modified_base 25: mod_base = OTHER; note = 2'-O-methyl modified nucleotide
  modified_base 26: mod_base = OTHER; note = 2'-O-methyl modified nucleotide
  modified_base 27: mod_base = OTHER; note = 2'-O-methyl modified nucleotide
  modified_base 28: mod_base = OTHER; note = 2'-O-methyl modified nucleotide
  modified_base 29: mod_base = OTHER; note = 2'-O-methyl modified nucleotide
  modified_base 30: mod_base = OTHER; note = 2'-O-methyl modified nucleotide
  modified_base 31: mod_base = OTHER; note = 2'-O-methyl modified nucleotide
  modified_base 32: mod_base = OTHER; note = 2'-O-methyl modified nucleotide
  modified_base 33: mod_base = OTHER; note = 2'-O-methyl modified nucleotide
  misc_difference 34: note = 2'-O-methyl modified nucleotide may be trivalent N-acetylgalactosamine modified
naagttgactagacacttttgtctagtcaactta

SEQ ID NO: 1738 - RNA, 34 nt, synthetic construct
  source 1..34: mol_type = other RNA
  misc_difference 1: note = 2'-O-methyl modified nucleotide may be 5' phosphate modified
  modified_base 2: mod_base = OTHER; note = 2'-fluoro modified nucleotide
  modified_base 3: mod_base = OTHER; note = 2'-O-methyl modified nucleotide
  modified_base 4: mod_base = OTHER; note = 2'-O-methyl modified nucleotide
  modified_base 5: mod_base = OTHER; note = 2'-O-methyl modified nucleotide
  modified_base 6: mod_base = OTHER; note = 2'-O-methyl modified nucleotide
  modified_base 7: mod_base = OTHER; note = 2'-O-methyl modified nucleotide
  modified_base 8: mod_base = OTHER; note = 2'-O-methyl modified nucleotide
  modified_base 9: mod_base = OTHER; note = 2'-O-methyl modified nucleotide
  modified_base 10: mod_base = OTHER; note = 2'-O-methyl modified nucleotide
  modified_base 11: mod_base = OTHER; note = 2'-O-methyl modified nucleotide
  modified_base 12: mod_base = OTHER; note = 2'-O-methyl modified nucleotide
  modified_base 13: mod_base = OTHER; note = 2'-O-methyl modified nucleotide
  modified_base 14: mod_base = OTHER; note = 2'-fluoro modified nucleotide
  modified_base 15: mod_base = OTHER; note = 2'-O-methyl modified nucleotide
  modified_base 16: mod_base = OTHER; note = 2'-O-methyl modified nucleotide
  modified_base 17: mod_base = OTHER; note = 2'-O-methyl modified nucleotide
  modified_base 18: mod_base = OTHER; note = 2'-O-methyl modified nucleotide
  modified_base 19: mod_base = OTHER; note = 2'-O-methyl modified nucleotide
  modified_base 20: mod_base = OTHER; note = 2'-O-methyl modified nucleotide
  modified_base 21: mod_base = OTHER; note = 2'-O-methyl modified nucleotide
  modified_base 22: mod_base = OTHER; note = 2'-fluoro modified nucleotide
  modified_base 23: mod_base = OTHER; note = 2'-fluoro modified nucleotide
  modified_base 24: mod_base = OTHER; note = 2'-fluoro modified nucleotide
  modified_base 25: mod_base = OTHER; note = 2'-O-methyl modified nucleotide
  modified_base 26: mod_base = OTHER; note = 2'-O-methyl modified nucleotide
  modified_base 27: mod_base = OTHER; note = 2'-O-methyl modified nucleotide
  modified_base 28: mod_base = OTHER; note = 2'-O-methyl modified nucleotide
  modified_base 29: mod_base = OTHER; note = 2'-O-methyl modified nucleotide
  modified_base 30: mod_base = OTHER; note = 2'-O-methyl modified nucleotide
  modified_base 31: mod_base = OTHER; note = 2'-O-methyl modified nucleotide
  modified_base 32: mod_base = OTHER; note = 2'-O-methyl modified nucleotide
  modified_base 33: mod_base = OTHER; note = 2'-O-methyl modified nucleotide
  misc_difference 34: note = 2'-O-methyl modified nucleotide may be trivalent N-acetylgalactosamine modified
ncatggcgggtgcggttccccgcacccgccatga

SEQ ID NO: 1739 - RNA, 34 nt, synthetic construct
  source 1..34: mol_type = other RNA
  misc_difference 1: note = 2'-O-methyl modified nucleotide may be 5' phosphate modified
  modified_base 2: mod_base = OTHER; note = 2'-fluoro modified nucleotide
  modified_base 3: mod_base = OTHER; note = 2'-O-methyl modified nucleotide
  modified_base 4: mod_base = OTHER; note = 2'-O-methyl modified nucleotide
  modified_base 5: mod_base = OTHER; note = 2'-O-methyl modified nucleotide
  modified_base 6: mod_base = OTHER; note = 2'-O-methyl modified nucleotide
  modified_base 7: mod_base = OTHER; note = 2'-O-methyl modified nucleotide
  modified_base 8: mod_base = OTHER; note = 2'-O-methyl modified nucleotide
  modified_base 9: mod_base = OTHER; note = 2'-O-methyl modified nucleotide
  modified_base 10: mod_base = OTHER; note = 2'-O-methyl modified nucleotide
  modified_base 11: mod_base = OTHER; note = 2'-O-methyl modified nucleotide
  modified_base 12: mod_base = OTHER; note = 2'-O-methyl modified nucleotide
  modified_base 13: mod_base = OTHER; note = 2'-O-methyl modified nucleotide
  modified_base 14: mod_base = OTHER; note = 2'-fluoro modified nucleotide
  modified_base 15: mod_base = OTHER; note = 2'-O-methyl modified nucleotide
  modified_base 16: mod_base = OTHER; note = 2'-O-methyl modified nucleotide
  modified_base 17: mod_base = OTHER; note = 2'-O-methyl modified nucleotide
  modified_base 18: mod_base = OTHER; note = 2'-O-methyl modified nucleotide
  modified_base 19: mod_base = OTHER; note = 2'-O-methyl modified nucleotide
  modified_base 20: mod_base = OTHER; note = 2'-O-methyl modified nucleotide
  modified_base 21: mod_base = OTHER; note = 2'-O-methyl modified nucleotide
  modified_base 22: mod_base = OTHER; note = 2'-fluoro modified nucleotide
  modified_base 23: mod_base = OTHER; note = 2'-fluoro modified nucleotide
  modified_base 24: mod_base = OTHER; note = 2'-fluoro modified nucleotide
  modified_base 25: mod_base = OTHER; note = 2'-O-methyl modified nucleotide
  modified_base 26: mod_base = OTHER; note = 2'-O-methyl modified nucleotide
  modified_base 27: mod_base = OTHER; note = 2'-O-methyl modified nucleotide
  modified_base 28: mod_base = OTHER; note = 2'-O-methyl modified nucleotide
  modified_base 29: mod_base = OTHER; note = 2'-O-methyl modified nucleotide
  modified_base 30: mod_base = OTHER; note = 2'-O-methyl modified nucleotide
  modified_base 31: mod_base = OTHER; note = 2'-O-methyl modified nucleotide
  modified_base 32: mod_base = OTHER; note = 2'-O-methyl modified nucleotide
  modified_base 33: mod_base = OTHER; note = 2'-O-methyl modified nucleotide
  misc_difference 34: note = 2'-O-methyl modified nucleotide may be trivalent N-acetylgalactosamine modified
nccggatctcatcaatgacttgatgagatccgga

SEQ ID NO: 1740 - RNA, 34 nt, synthetic construct
  source 1..34: mol_type = other RNA
  misc_difference 1: note = 2'-O-methyl modified nucleotide may be 5' phosphate modified
  modified_base 2: mod_base = OTHER; note = 2'-fluoro modified nucleotide
  modified_base 3: mod_base = OTHER; note = 2'-O-methyl modified nucleotide
  modified_base 4: mod_base = OTHER; note = 2'-O-methyl modified nucleotide
  modified_base 5: mod_base = OTHER; note = 2'-O-methyl modified nucleotide
  modified_base 6: mod_base = OTHER; note = 2'-O-methyl modified nucleotide
  modified_base 7: mod_base = OTHER; note = 2'-O-methyl modified nucleotide
  modified_base 8: mod_base = OTHER; note = 2'-O-methyl modified nucleotide
  modified_base 9: mod_base = OTHER; note = 2'-O-methyl modified nucleotide
  modified_base 10: mod_base = OTHER; note = 2'-O-methyl modified nucleotide
  modified_base 11: mod_base = OTHER; note = 2'-O-methyl modified nucleotide
  modified_base 12: mod_base = OTHER; note = 2'-O-methyl modified nucleotide
  modified_base 13: mod_base = OTHER; note = 2'-O-methyl modified nucleotide
  modified_base 14: mod_base = OTHER; note = 2'-fluoro modified nucleotide
  modified_base 15: mod_base = OTHER; note = 2'-O-methyl modified nucleotide
  modified_base 16: mod_base = OTHER; note = 2'-O-methyl modified nucleotide
  modified_base 17: mod_base = OTHER; note = 2'-O-methyl modified nucleotide
  modified_base 18: mod_base = OTHER; note = 2'-O-methyl modified nucleotide
  modified_base 19: mod_base = OTHER; note = 2'-O-methyl modified nucleotide
  modified_base 20: mod_base = OTHER; note = 2'-O-methyl modified nucleotide
  modified_base 21: mod_base = OTHER; note = 2'-O-methyl modified nucleotide
  modified_base 22: mod_base = OTHER; note = 2'-fluoro modified nucleotide
  modified_base 23: mod_base = OTHER; note = 2'-fluoro modified nucleotide
  modified_base 24: mod_base = OTHER; note = 2'-fluoro modified nucleotide
  modified_base 25: mod_base = OTHER; note = 2'-O-methyl modified nucleotide
  modified_base 26: mod_base = OTHER; note = 2'-O-methyl modified nucleotide
  modified_base 27: mod_base = OTHER; note = 2'-O-methyl modified nucleotide
  modified_base 28: mod_base = OTHER; note = 2'-O-methyl modified nucleotide
  modified_base 29: mod_base = OTHER; note = 2'-O-methyl modified nucleotide
  modified_base 30: mod_base = OTHER; note = 2'-O-methyl modified nucleotide
  modified_base 31: mod_base = OTHER; note = 2'-O-methyl modified nucleotide
  modified_base 32: mod_base = OTHER; note = 2'-O-methyl modified nucleotide
  modified_base 33: mod_base = OTHER; note = 2'-O-methyl modified nucleotide
  misc_difference 34: note = 2'-O-methyl modified nucleotide may be trivalent N-acetylgalactosamine modified
ngaggaagcctcaaagctctttgaggcttcctca

SEQ ID NO: 1741 - RNA, 34 nt, synthetic construct
  source 1..34: mol_type = other RNA
  misc_difference 1: note = 2'-O-methyl modified nucleotide may be 5' phosphate modified
  modified_base 2: mod_base = OTHER; note = 2'-fluoro modified nucleotide
  modified_base 3: mod_base = OTHER; note = 2'-O-methyl modified nucleotide
  modified_base 4: mod_base = OTHER; note = 2'-O-methyl modified nucleotide
  modified_base 5: mod_base = OTHER; note = 2'-O-methyl modified nucleotide
  modified_base 6: mod_base = OTHER; note = 2'-O-methyl modified nucleotide
  modified_base 7: mod_base = OTHER; note = 2'-O-methyl modified nucleotide
  modified_base 8: mod_base = OTHER; note = 2'-O-methyl modified nucleotide
  modified_base 9: mod_base = OTHER; note = 2'-O-methyl modified nucleotide
  modified_base 10: mod_base = OTHER; note = 2'-O-methyl modified nucleotide
  modified_base 11: mod_base = OTHER; note = 2'-O-methyl modified nucleotide
  modified_base 12: mod_base = OTHER; note = 2'-O-methyl modified nucleotide
  modified_base 13: mod_base = OTHER; note = 2'-O-methyl modified nucleotide
  modified_base 14: mod_base = OTHER; note = 2'-fluoro modified nucleotide
  modified_base 15: mod_base = OTHER; note = 2'-O-methyl modified nucleotide
  modified_base 16: mod_base = OTHER; note = 2'-O-methyl modified nucleotide
  modified_base 17: mod_base = OTHER; note = 2'-O-methyl modified nucleotide
  modified_base 18: mod_base = OTHER; note = 2'-O-methyl modified nucleotide
  modified_base 19: mod_base = OTHER; note = 2'-O-methyl modified nucleotide
  modified_base 20: mod_base = OTHER; note = 2'-O-methyl modified nucleotide
  modified_base 21: mod_base = OTHER; note = 2'-O-methyl modified nucleotide
  modified_base 22: mod_base = OTHER; note = 2'-fluoro modified nucleotide
  modified_base 23: mod_base = OTHER; note = 2'-fluoro modified nucleotide
  modified_base 24: mod_base = OTHER; note = 2'-fluoro modified nucleotide
  modified_base 25: mod_base = OTHER; note = 2'-O-methyl modified nucleotide
  modified_base 26: mod_base = OTHER; note = 2'-O-methyl modified nucleotide
  modified_base 27: mod_base = OTHER; note = 2'-O-methyl modified nucleotide
  modified_base 28: mod_base = OTHER; note = 2'-O-methyl modified nucleotide
  modified_base 29: mod_base = OTHER; note = 2'-O-methyl modified nucleotide
  modified_base 30: mod_base = OTHER; note = 2'-O-methyl modified nucleotide
  modified_base 31: mod_base = OTHER; note = 2'-O-methyl modified nucleotide
  modified_base 32: mod_base = OTHER; note = 2'-O-methyl modified nucleotide
  modified_base 33: mod_base = OTHER; note = 2'-O-methyl modified nucleotide
  misc_difference 34: note = 2'-O-methyl modified nucleotide may be trivalent N-acetylgalactosamine modified
nactttgaacacatgttgccatgtgttcaaagta

SEQ ID NO: 1742 - RNA, 34 nt, synthetic construct
  source 1..34: mol_type = other RNA
  misc_difference 1: note = 2'-O-methyl modified nucleotide may be 5' phosphate modified
  modified_base 2: mod_base = OTHER; note = 2'-fluoro modified nucleotide
  modified_base 3: mod_base = OTHER; note = 2'-O-methyl modified nucleotide
  modified_base 4: mod_base = OTHER; note = 2'-O-methyl modified nucleotide
  modified_base 5: mod_base = OTHER; note = 2'-O-methyl modified nucleotide
  modified_base 6: mod_base = OTHER; note = 2'-O-methyl modified nucleotide
  modified_base 7: mod_base = OTHER; note = 2'-O-methyl modified nucleotide
  modified_base 8: mod_base = OTHER; note = 2'-O-methyl modified nucleotide
  modified_base 9: mod_base = OTHER; note = 2'-O-methyl modified nucleotide
  modified_base 10: mod_base = OTHER; note = 2'-O-methyl modified nucleotide
  modified_base 11: mod_base = OTHER; note = 2'-O-methyl modified nucleotide
  modified_base 12: mod_base = OTHER; note = 2'-O-methyl modified nucleotide
  modified_base 13: mod_base = OTHER; note = 2'-O-methyl modified nucleotide
  modified_base 14: mod_base = OTHER; note = 2'-fluoro modified nucleotide
  modified_base 15: mod_base = OTHER; note = 2'-O-methyl modified nucleotide
  modified_base 16: mod_base = OTHER; note = 2'-O-methyl modified nucleotide
  modified_base 17: mod_base = OTHER; note = 2'-O-methyl modified nucleotide
  modified_base 18: mod_base = OTHER; note = 2'-O-methyl modified nucleotide
  modified_base 19: mod_base = OTHER; note = 2'-O-methyl modified nucleotide
  modified_base 20: mod_base = OTHER; note = 2'-O-methyl modified nucleotide
  modified_base 21: mod_base = OTHER; note = 2'-O-methyl modified nucleotide
  modified_base 22: mod_base = OTHER; note = 2'-fluoro modified nucleotide
  modified_base 23: mod_base = OTHER; note = 2'-fluoro modified nucleotide
  modified_base 24: mod_base = OTHER; note = 2'-fluoro modified nucleotide
  modified_base 25: mod_base = OTHER; note = 2'-O-methyl modified nucleotide
  modified_base 26: mod_base = OTHER; note = 2'-O-methyl modified nucleotide
  modified_base 27: mod_base = OTHER; note = 2'-O-methyl modified nucleotide
  modified_base 28: mod_base = OTHER; note = 2'-O-methyl modified nucleotide
  modified_base 29: mod_base = OTHER; note = 2'-O-methyl modified nucleotide
  modified_base 30: mod_base = OTHER; note = 2'-O-methyl modified nucleotide
  modified_base 31: mod_base = OTHER; note = 2'-O-methyl modified nucleotide
  modified_base 32: mod_base = OTHER; note = 2'-O-methyl modified nucleotide
  modified_base 33: mod_base = OTHER; note = 2'-O-methyl modified nucleotide
  misc_difference 34: note = 2'-O-methyl modified nucleotide may be trivalent N-acetylgalactosamine modified
nctcctcctcagacacaaatgtctgaggaggaga

SEQ ID NO: 1743 - RNA, 34 nt, synthetic construct
  source 1..34: mol_type = other RNA
  misc_difference 1: note = 2'-O-methyl modified nucleotide may be 5' phosphate modified
  modified_base 2: mod_base = OTHER; note = 2'-fluoro modified nucleotide
  modified_base 3: mod_base = OTHER; note = 2'-O-methyl modified nucleotide
  modified_base 4: mod_base = OTHER; note = 2'-O-methyl modified nucleotide
  modified_base 5: mod_base = OTHER; note = 2'-O-methyl modified nucleotide
  modified_base 6: mod_base = OTHER; note = 2'-O-methyl modified nucleotide
  modified_base 7: mod_base = OTHER; note = 2'-O-methyl modified nucleotide
  modified_base 8: mod_base = OTHER; note = 2'-O-methyl modified nucleotide
  modified_base 9: mod_base = OTHER; note = 2'-O-methyl modified nucleotide
  modified_base 10: mod_base = OTHER; note = 2'-O-methyl modified nucleotide
  modified_base 11: mod_base = OTHER; note = 2'-O-methyl modified nucleotide
  modified_base 12: mod_base = OTHER; note = 2'-O-methyl modified nucleotide
  modified_base 13: mod_base = OTHER; note = 2'-O-methyl modified nucleotide
  modified_base 14: mod_base = OTHER; note = 2'-fluoro modified nucleotide
  modified_base 15: mod_base = OTHER; note = 2'-O-methyl modified nucleotide
  modified_base 16: mod_base = OTHER; note = 2'-O-methyl modified nucleotide
  modified_base 17: mod_base = OTHER; note = 2'-O-methyl modified nucleotide
  modified_base 18: mod_base = OTHER; note = 2'-O-methyl modified nucleotide
  modified_base 19: mod_base = OTHER; note = 2'-O-methyl modified nucleotide
  modified_base 20: mod_base = OTHER; note = 2'-O-methyl modified nucleotide
  modified_base 21: mod_base = OTHER; note = 2'-O-methyl modified nucleotide
  modified_base 22: mod_base = OTHER; note = 2'-fluoro modified nucleotide
  modified_base 23: mod_base = OTHER; note = 2'-fluoro modified nucleotide
  modified_base 24: mod_base = OTHER; note = 2'-fluoro modified nucleotide
  modified_base 25: mod_base = OTHER; note = 2'-O-methyl modified nucleotide
  modified_base 26: mod_base = OTHER; note = 2'-O-methyl modified nucleotide
  modified_base 27: mod_base = OTHER; note = 2'-O-methyl modified nucleotide
  modified_base 28: mod_base = OTHER; note = 2'-O-methyl modified nucleotide
  modified_base 29: mod_base = OTHER; note = 2'-O-methyl modified nucleotide
  modified_base 30: mod_base = OTHER; note = 2'-O-methyl modified nucleotide
  modified_base 31: mod_base = OTHER; note = 2'-O-methyl modified nucleotide
  modified_base 32: mod_base = OTHER; note = 2'-O-methyl modified nucleotide
  modified_base 33: mod_base = OTHER; note = 2'-O-methyl modified nucleotide
  misc_difference 34: note = 2'-O-methyl modified nucleotide may be trivalent N-acetylgalactosamine modified
naggaaggctccgtcccgcgacggagccttccta

SEQ ID NO: 1744 - RNA, 34 nt, synthetic construct
  source 1..34: mol_type = other RNA
  misc_difference 1: note = 2'-O-methyl modified nucleotide may be 5' phosphate modified
  modified_base 2: mod_base = OTHER; note = 2'-fluoro modified nucleotide
  modified_base 3: mod_base = OTHER; note = 2'-O-methyl modified nucleotide
  modified_base 4: mod_base = OTHER; note = 2'-O-methyl modified nucleotide
  modified_base 5: mod_base = OTHER; note = 2'-O-methyl modified nucleotide
  modified_base 6: mod_base = OTHER; note = 2'-O-methyl modified nucleotide
  modified_base 7: mod_base = OTHER; note = 2'-O-methyl modified nucleotide
  modified_base 8: mod_base = OTHER; note = 2'-O-methyl modified nucleotide
  modified_base 9: mod_base = OTHER; note = 2'-O-methyl modified nucleotide
  modified_base 10: mod_base = OTHER; note = 2'-O-methyl modified nucleotide
  modified_base 11: mod_base = OTHER; note = 2'-O-methyl modified nucleotide
  modified_base 12: mod_base = OTHER; note = 2'-O-methyl modified nucleotide
  modified_base 13: mod_base = OTHER; note = 2'-O-methyl modified nucleotide
  modified_base 14: mod_base = OTHER; note = 2'-fluoro modified nucleotide
  modified_base 15: mod_base = OTHER; note = 2'-O-methyl modified nucleotide
  modified_base 16: mod_base = OTHER; note = 2'-O-methyl modified nucleotide
  modified_base 17: mod_base = OTHER; note = 2'-O-methyl modified nucleotide
  modified_base 18: mod_base = OTHER; note = 2'-O-methyl modified nucleotide
  modified_base 19: mod_base = OTHER; note = 2'-O-methyl modified nucleotide
  modified_base 20: mod_base = OTHER; note = 2'-O-methyl modified nucleotide
  modified_base 21: mod_base = OTHER; note = 2'-O-methyl modified nucleotide
  modified_base 22: mod_base = OTHER; note = 2'-fluoro modified nucleotide
  modified_base 23: mod_base = OTHER; note = 2'-fluoro modified nucleotide
  modified_base 24: mod_base = OTHER; note = 2'-fluoro modified nucleotide
  modified_base 25: mod_base = OTHER; note = 2'-O-methyl modified nucleotide
  modified_base 26: mod_base = OTHER; note = 2'-O-methyl modified nucleotide
  modified_base 27: mod_base = OTHER; note = 2'-O-methyl modified nucleotide
  modified_base 28: mod_base = OTHER; note = 2'-O-methyl modified nucleotide
  modified_base 29: mod_base = OTHER; note = 2'-O-methyl modified nucleotide
  modified_base 30: mod_base = OTHER; note = 2'-O-methyl modified nucleotide
  modified_base 31: mod_base = OTHER; note = 2'-O-methyl modified nucleotide
  modified_base 32: mod_base = OTHER; note = 2'-O-methyl modified nucleotide
  modified_base 33: mod_base = OTHER; note = 2'-O-methyl modified nucleotide
  misc_difference 34: note = 2'-O-methyl modified nucleotide may be trivalent N-acetylgalactosamine modified
ncgccagaatcacctctgcaggtgattctggcga

SEQ ID NO: 1745 - RNA, 34 nt, synthetic construct
  source 1..34: mol_type = other RNA
  misc_difference 1: note = 2'-O-methyl modified nucleotide may be 5' phosphate modified
  modified_base 2: mod_base = OTHER; note = 2'-fluoro modified nucleotide
  modified_base 3: mod_base = OTHER; note = 2'-O-methyl modified nucleotide
  modified_base 4: mod_base = OTHER; note = 2'-O-methyl modified nucleotide
  modified_base 5: mod_base = OTHER; note = 2'-O-methyl modified nucleotide
  modified_base 6: mod_base = OTHER; note = 2'-O-methyl modified nucleotide
  modified_base 7: mod_base = OTHER; note = 2'-O-methyl modified nucleotide
  modified_base 8: mod_base = OTHER; note = 2'-O-methyl modified nucleotide
  modified_base 9: mod_base = OTHER; note = 2'-O-methyl modified nucleotide
  modified_base 10: mod_base = OTHER; note = 2'-O-methyl modified nucleotide
  modified_base 11: mod_base = OTHER; note = 2'-O-methyl modified nucleotide
  modified_base 12: mod_base = OTHER; note = 2'-O-methyl modified nucleotide
  modified_base 13: mod_base = OTHER; note = 2'-O-methyl modified nucleotide
  modified_base 14: mod_base = OTHER; note = 2'-fluoro modified nucleotide
  modified_base 15: mod_base = OTHER; note = 2'-O-methyl modified nucleotide
  modified_base 16: mod_base = OTHER; note = 2'-O-methyl modified nucleotide
  modified_base 17: mod_base = OTHER; note = 2'-O-methyl modified nucleotide
  modified_base 18: mod_base = OTHER; note = 2'-O-methyl modified nucleotide
  modified_base 19: mod_base = OTHER; note = 2'-O-methyl modified nucleotide
  modified_base 20: mod_base = OTHER; note = 2'-O-methyl modified nucleotide
  modified_base 21: mod_base = OTHER; note = 2'-O-methyl modified nucleotide
  modified_base 22: mod_base = OTHER; note = 2'-fluoro modified nucleotide
  modified_base 23: mod_base = OTHER; note = 2'-fluoro modified nucleotide
  modified_base 24: mod_base = OTHER; note = 2'-fluoro modified nucleotide
  modified_base 25: mod_base = OTHER; note = 2'-O-methyl modified nucleotide
  modified_base 26: mod_base = OTHER; note = 2'-O-methyl modified nucleotide
  modified_base 27: mod_base = OTHER; note = 2'-O-methyl modified nucleotide
  modified_base 28: mod_base = OTHER; note = 2'-O-methyl modified nucleotide
  modified_base 29: mod_base = OTHER; note = 2'-O-methyl modified nucleotide
  modified_base 30: mod_base = OTHER; note = 2'-O-methyl modified nucleotide
  modified_base 31: mod_base = OTHER; note = 2'-O-methyl modified nucleotide
  modified_base 32: mod_base = OTHER; note = 2'-O-methyl modified nucleotide
  modified_base 33: mod_base = OTHER; note = 2'-O-methyl modified nucleotide
  misc_difference 34: note = 2'-O-methyl modified nucleotide may be trivalent N-acetylgalactosamine modified
nggaaagagatctcatcactgagatctctttcca

SEQ ID NO: 1746 - RNA, 34 nt, synthetic construct
  source 1..34: mol_type = other RNA
  misc_difference 1: note = 2'-O-methyl modified nucleotide may be 5' phosphate modified
  modified_base 2: mod_base = OTHER; note = 2'-fluoro modified nucleotide
  modified_base 3: mod_base = OTHER; note = 2'-O-methyl modified nucleotide
  modified_base 4: mod_base = OTHER; note = 2'-O-methyl modified nucleotide
  modified_base 5: mod_base = OTHER; note = 2'-O-methyl modified nucleotide
  modified_base 6: mod_base = OTHER; note = 2'-O-methyl modified nucleotide
  modified_base 7: mod_base = OTHER; note = 2'-O-methyl modified nucleotide
  modified_base 8: mod_base = OTHER; note = 2'-O-methyl modified nucleotide
  modified_base 9: mod_base = OTHER; note = 2'-O-methyl modified nucleotide
  modified_base 10: mod_base = OTHER; note = 2'-O-methyl modified nucleotide
  modified_base 11: mod_base = OTHER; note = 2'-O-methyl modified nucleotide
  modified_base 12: mod_base = OTHER; note = 2'-O-methyl modified nucleotide
  modified_base 13: mod_base = OTHER; note = 2'-O-methyl modified nucleotide
  modified_base 14: mod_base = OTHER; note = 2'-fluoro modified nucleotide
  modified_base 15: mod_base = OTHER; note = 2'-O-methyl modified nucleotide
  modified_base 16: mod_base = OTHER; note = 2'-O-methyl modified nucleotide
  modified_base 17: mod_base = OTHER; note = 2'-O-methyl modified nucleotide
  modified_base 18: mod_base = OTHER; note = 2'-O-methyl modified nucleotide
  modified_base 19: mod_base = OTHER; note = 2'-O-methyl modified nucleotide
  modified_base 20: mod_base = OTHER; note = 2'-O-methyl modified nucleotide
  modified_base 21: mod_base = OTHER; note = 2'-O-methyl modified nucleotide
  modified_base 22: mod_base = OTHER; note = 2'-fluoro modified nucleotide
  modified_base 23: mod_base = OTHER; note = 2'-fluoro modified nucleotide
  modified_base 24: mod_base = OTHER; note = 2'-fluoro modified nucleotide
  modified_base 25: mod_base = OTHER; note = 2'-O-methyl modified nucleotide
  modified_base 26: mod_base = OTHER; note = 2'-O-methyl modified nucleotide
  modified_base 27: mod_base = OTHER; note = 2'-O-methyl modified nucleotide
  modified_base 28: mod_base = OTHER; note = 2'-O-methyl modified nucleotide
  modified_base 29: mod_base = OTHER; note = 2'-O-methyl modified nucleotide
  modified_base 30: mod_base = OTHER; note = 2'-O-methyl modified nucleotide
  modified_base 31: mod_base = OTHER; note = 2'-O-methyl modified nucleotide
  modified_base 32: mod_base = OTHER; note = 2'-O-methyl modified nucleotide
  modified_base 33: mod_base = OTHER; note = 2'-O-methyl modified nucleotide
  misc_difference 34: note = 2'-O-methyl modified nucleotide may be trivalent N-acetylgalactosamine modified
naagtcccggatctcatcagagatccgggactta

SEQ ID NO: 1747 - RNA, 34 nt, synthetic construct
  source 1..34: mol_type = other RNA
  misc_difference 1: note = 2'-O-methyl modified nucleotide may be 5' phosphate modified
  modified_base 2: mod_base = OTHER; note = 2'-fluoro modified nucleotide
  modified_base 3: mod_base = OTHER; note = 2'-O-methyl modified nucleotide
  modified_base 4: mod_base = OTHER; note = 2'-O-methyl modified nucleotide
  modified_base 5: mod_base = OTHER; note = 2'-O-methyl modified nucleotide
  modified_base 6: mod_base = OTHER; note = 2'-O-methyl modified nucleotide
  modified_base 7: mod_base = OTHER; note = 2'-O-methyl modified nucleotide
  modified_base 8: mod_base = OTHER; note = 2'-O-methyl modified nucleotide
  modified_base 9: mod_base = OTHER; note = 2'-O-methyl modified nucleotide
  modified_base 10: mod_base = OTHER; note = 2'-O-methyl modified nucleotide
  modified_base 11: mod_base = OTHER; note = 2'-O-methyl modified nucleotide
  modified_base 12: mod_base = OTHER; note = 2'-O-methyl modified nucleotide
  modified_base 13: mod_base = OTHER; note = 2'-O-methyl modified nucleotide
  modified_base 14: mod_base = OTHER; note = 2'-fluoro modified nucleotide
  modified_base 15: mod_base = OTHER; note = 2'-O-methyl modified nucleotide
  modified_base 16: mod_base = OTHER; note = 2'-O-methyl modified nucleotide
  modified_base 17: mod_base = OTHER; note = 2'-O-methyl modified nucleotide
  modified_base 18: mod_base = OTHER; note = 2'-O-methyl modified nucleotide
  modified_base 19: mod_base = OTHER; note = 2'-O-methyl modified nucleotide
  modified_base 20: mod_base = OTHER; note = 2'-O-methyl modified nucleotide
  modified_base 21: mod_base = OTHER; note = 2'-O-methyl modified nucleotide
  modified_base 22: mod_base = OTHER; note = 2'-fluoro modified nucleotide
  modified_base 23: mod_base = OTHER; note = 2'-fluoro modified nucleotide
  modified_base 24: mod_base = OTHER; note = 2'-fluoro modified nucleotide
  modified_base 25: mod_base = OTHER; note = 2'-O-methyl modified nucleotide
  modified_base 26: mod_base = OTHER; note = 2'-O-methyl modified nucleotide
  modified_base 27: mod_base = OTHER; note = 2'-O-methyl modified nucleotide
  modified_base 28: mod_base = OTHER; note = 2'-O-methyl modified nucleotide
  modified_base 29: mod_base = OTHER; note = 2'-O-methyl modified nucleotide
  modified_base 30: mod_base = OTHER; note = 2'-O-methyl modified nucleotide
  modified_base 31: mod_base = OTHER; note = 2'-O-methyl modified nucleotide
  modified_base 32: mod_base = OTHER; note = 2'-O-methyl modified nucleotide
  modified_base 33: mod_base = OTHER; note = 2'-O-methyl modified nucleotide
  misc_difference 34: note = 2'-O-methyl modified nucleotide may be trivalent N-acetylgalactosamine modified
ngagcttgatcagggcaacccctgatcaagctca

SEQ ID NO: 1748 - RNA, 34 nt, synthetic construct
  source 1..34: mol_type = other RNA
  misc_difference 1: note = 2'-O-methyl modified nucleotide may be 5' phosphate modified
  modified_base 2: mod_base = OTHER; note = 2'-fluoro modified nucleotide
  modified_base 3: mod_base = OTHER; note = 2'-O-methyl modified nucleotide
  modified_base 4: mod_base = OTHER; note = 2'-O-methyl modified nucleotide
  modified_base 5: mod_base = OTHER; note = 2'-O-methyl modified nucleotide
  modified_base 6: mod_base = OTHER; note = 2'-O-methyl modified nucleotide
  modified_base 7: mod_base = OTHER; note = 2'-O-methyl modified nucleotide
  modified_base 8: mod_base = OTHER; note = 2'-O-methyl modified nucleotide
  modified_base 9: mod_base = OTHER; note = 2'-O-methyl modified nucleotide
  modified_base 10: mod_base = OTHER; note = 2'-O-methyl modified nucleotide
  modified_base 11: mod_base = OTHER; note = 2'-O-methyl modified nucleotide
  modified_base 12: mod_base = OTHER; note = 2'-O-methyl modified nucleotide
  modified_base 13: mod_base = OTHER; note = 2'-O-methyl modified nucleotide
  modified_base 14: mod_base = OTHER; note = 2'-fluoro modified nucleotide
  modified_base 15: mod_base = OTHER; note = 2'-O-methyl modified nucleotide
  modified_base 16: mod_base = OTHER; note = 2'-O-methyl modified nucleotide
  modified_base 17: mod_base = OTHER; note = 2'-O-methyl modified nucleotide
  modified_base 18: mod_base = OTHER; note = 2'-O-methyl modified nucleotide
  modified_base 19: mod_base = OTHER; note = 2'-O-methyl modified nucleotide
  modified_base 20: mod_base = OTHER; note = 2'-O-methyl modified nucleotide
  modified_base 21: mod_base = OTHER; note = 2'-O-methyl modified nucleotide
  modified_base 22: mod_base = OTHER; note = 2'-fluoro modified nucleotide
  modified_base 23: mod_base = OTHER; note = 2'-fluoro modified nucleotide
  modified_base 24: mod_base = OTHER; note = 2'-fluoro modified nucleotide
  modified_base 25: mod_base = OTHER; note = 2'-O-methyl modified nucleotide
  modified_base 26: mod_base = OTHER; note = 2'-O-methyl modified nucleotide
  modified_base 27: mod_base = OTHER; note = 2'-O-methyl modified nucleotide
  modified_base 28: mod_base = OTHER; note = 2'-O-methyl modified nucleotide
  modified_base 29: mod_base = OTHER; note = 2'-O-methyl modified nucleotide
  modified_base 30: mod_base = OTHER; note = 2'-O-methyl modified nucleotide
  modified_base 31: mod_base = OTHER; note = 2'-O-methyl modified nucleotide
  modified_base 32: mod_base = OTHER; note = 2'-O-methyl modified nucleotide
  modified_base 33: mod_base = OTHER; note = 2'-O-methyl modified nucleotide
  misc_difference 34: note = 2'-O-methyl modified nucleotide may be trivalent N-acetylgalactosamine modified
ngttgctcattgtctttctagacaatgagcaaca

SEQ ID NO: 1749 - RNA, 34 nt, synthetic construct
  source 1..34: mol_type = other RNA
  misc_difference 1: note = 2'-O-methyl modified nucleotide may be 5' phosphate modified
  modified_base 2: mod_base = OTHER; note = 2'-fluoro modified nucleotide
  modified_base 3: mod_base = OTHER; note = 2'-O-methyl modified nucleotide
  modified_base 4: mod_base = OTHER; note = 2'-O-methyl modified nucleotide
  modified_base 5: mod_base = OTHER; note = 2'-O-methyl modified nucleotide
  modified_base 6: mod_base = OTHER; note = 2'-O-methyl modified nucleotide
  modified_base 7: mod_base = OTHER; note = 2'-O-methyl modified nucleotide
  modified_base 8: mod_base = OTHER; note = 2'-O-methyl modified nucleotide
  modified_base 9: mod_base = OTHER; note = 2'-O-methyl modified nucleotide
  modified_base 10: mod_base = OTHER; note = 2'-O-methyl modified nucleotide
  modified_base 11: mod_base = OTHER; note = 2'-O-methyl modified nucleotide
  modified_base 12: mod_base = OTHER; note = 2'-O-methyl modified nucleotide
  modified_base 13: mod_base = OTHER; note = 2'-O-methyl modified nucleotide
  modified_base 14: mod_base = OTHER; note = 2'-fluoro modified nucleotide
  modified_base 15: mod_base = OTHER; note = 2'-O-methyl modified nucleotide
  modified_base 16: mod_base = OTHER; note = 2'-O-methyl modified nucleotide
  modified_base 17: mod_base = OTHER; note = 2'-O-methyl modified nucleotide
  modified_base 18: mod_base = OTHER; note = 2'-O-methyl modified nucleotide
  modified_base 19: mod_base = OTHER; note = 2'-O-methyl modified nucleotide
  modified_base 20: mod_base = OTHER; note = 2'-O-methyl modified nucleotide
  modified_base 21: mod_base = OTHER; note = 2'-O-methyl modified nucleotide
  modified_base 22: mod_base = OTHER; note = 2'-fluoro modified nucleotide
  modified_base 23: mod_base = OTHER; note = 2'-fluoro modified nucleotide
  modified_base 24: mod_base = OTHER; note = 2'-fluoro modified nucleotide
  modified_base 25: mod_base = OTHER; note = 2'-O-methyl modified nucleotide
  modified_base 26: mod_base = OTHER; note = 2'-O-methyl modified nucleotide
  modified_base 27: mod_base = OTHER; note = 2'-O-methyl modified nucleotide
  modified_base 28: mod_base = OTHER; note = 2'-O-methyl modified nucleotide
  modified_base 29: mod_base = OTHER; note = 2'-O-methyl modified nucleotide
  modified_base 30: mod_base = OTHER; note = 2'-O-methyl modified nucleotide
  modified_base 31: mod_base = OTHER; note = 2'-O-methyl modified nucleotide
  modified_base 32: mod_base = OTHER; note = 2'-O-methyl modified nucleotide
  modified_base 33: mod_base = OTHER; note = 2'-O-methyl modified nucleotide
  misc_difference 34: note = 2'-O-methyl modified nucleotide may be trivalent N-acetylgalactosamine modified
ntgcttgtggtaatcggtagattaccacaagcaa

SEQ ID NO: 1750 - RNA, 34 nt, synthetic construct
  source 1..34: mol_type = other RNA
  misc_difference 1: note = 2'-O-methyl modified nucleotide may be 5' phosphate modified
  modified_base 2: mod_base = OTHER; note = 2'-fluoro modified nucleotide
  modified_base 3: mod_base = OTHER; note = 2'-O-methyl modified nucleotide
  modified_base 4: mod_base = OTHER; note = 2'-O-methyl modified nucleotide
  modified_base 5: mod_base = OTHER; note = 2'-O-methyl modified nucleotide
  modified_base 6: mod_base = OTHER; note = 2'-O-methyl modified nucleotide
  modified_base 7: mod_base = OTHER; note = 2'-O-methyl modified nucleotide
  modified_base 8: mod_base = OTHER; note = 2'-O-methyl modified nucleotide
  modified_base 9: mod_base = OTHER; note = 2'-O-methyl modified nucleotide
  modified_base 10: mod_base = OTHER; note = 2'-O-methyl modified nucleotide
  modified_base 11: mod_base = OTHER; note = 2'-O-methyl modified nucleotide
  modified_base 12: mod_base = OTHER; note = 2'-O-methyl modified nucleotide
  modified_base 13: mod_base = OTHER; note = 2'-O-methyl modified nucleotide
  modified_base 14: mod_base = OTHER; note = 2'-fluoro modified nucleotide
  modified_base 15: mod_base = OTHER; note = 2'-O-methyl modified nucleotide
  modified_base 16: mod_base = OTHER; note = 2'-O-methyl modified nucleotide
  modified_base 17: mod_base = OTHER; note = 2'-O-methyl modified nucleotide
  modified_base 18: mod_base = OTHER; note = 2'-O-methyl modified nucleotide
  modified_base 19: mod_base = OTHER; note = 2'-O-methyl modified nucleotide
  modified_base 20: mod_base = OTHER; note = 2'-O-methyl modified nucleotide
  modified_base 21: mod_base = OTHER; note = 2'-O-methyl modified nucleotide
  modified_base 22: mod_base = OTHER; note = 2'-fluoro modified nucleotide
  modified_base 23: mod_base = OTHER; note = 2'-fluoro modified nucleotide
  modified_base 24: mod_base = OTHER; note = 2'-fluoro modified nucleotide
  modified_base 25: mod_base = OTHER; note = 2'-O-methyl modified nucleotide
  modified_base 26: mod_base = OTHER; note = 2'-O-methyl modified nucleotide
  modified_base 27: mod_base = OTHER; note = 2'-O-methyl modified nucleotide
  modified_base 28: mod_base = OTHER; note = 2'-O-methyl modified nucleotide
  modified_base 29: mod_base = OTHER; note = 2'-O-methyl modified nucleotide
  modified_base 30: mod_base = OTHER; note = 2'-O-methyl modified nucleotide
  modified_base 31: mod_base = OTHER; note = 2'-O-methyl modified nucleotide
  modified_base 32: mod_base = OTHER; note = 2'-O-methyl modified nucleotide
  modified_base 33: mod_base = OTHER; note = 2'-O-methyl modified nucleotide
  misc_difference 34: note = 2'-O-methyl modified nucleotide may be trivalent N-acetylgalactosamine modified
ntcatcactcacattgtagaatgtgagtgatgaa

SEQ ID NO: 1751 - RNA, 34 nt, synthetic construct
  source 1..34: mol_type = other RNA
  misc_difference 1: note = 2'-O-methyl modified nucleotide may be 5' phosphate modified
  modified_base 2: mod_base = OTHER; note = 2'-fluoro modified nucleotide
  modified_base 3: mod_base = OTHER; note = 2'-O-methyl modified nucleotide
  modified_base 4: mod_base = OTHER; note = 2'-O-methyl modified nucleotide
  modified_base 5: mod_base = OTHER; note = 2'-O-methyl modified nucleotide
  modified_base 6: mod_base = OTHER; note = 2'-O-methyl modified nucleotide
  modified_base 7: mod_base = OTHER; note = 2'-O-methyl modified nucleotide
  modified_base 8: mod_base = OTHER; note = 2'-O-methyl modified nucleotide
  modified_base 9: mod_base = OTHER; note = 2'-O-methyl modified nucleotide
  modified_base 10: mod_base = OTHER; note = 2'-O-methyl modified nucleotide
  modified_base 11: mod_base = OTHER; note = 2'-O-methyl modified nucleotide
  modified_base 12: mod_base = OTHER; note = 2'-O-methyl modified nucleotide
  modified_base 13: mod_base = OTHER; note = 2'-O-methyl modified nucleotide
  modified_base 14: mod_base = OTHER; note = 2'-fluoro modified nucleotide
  modified_base 15: mod_base = OTHER; note = 2'-O-methyl modified nucleotide
  modified_base 16: mod_base = OTHER; note = 2'-O-methyl modified nucleotide
  modified_base 17: mod_base = OTHER; note = 2'-O-methyl modified nucleotide
  modified_base 18: mod_base = OTHER; note = 2'-O-methyl modified nucleotide
  modified_base 19: mod_base = OTHER; note = 2'-O-methyl modified nucleotide
  modified_base 20: mod_base = OTHER; note = 2'-O-methyl modified nucleotide
  modified_base 21: mod_base = OTHER; note = 2'-O-methyl modified nucleotide
  modified_base 22: mod_base = OTHER; note = 2'-fluoro modified nucleotide
  modified_base 23: mod_base = OTHER; note = 2'-fluoro modified nucleotide
  modified_base 24: mod_base = OTHER; note = 2'-fluoro modified nucleotide
  modified_base 25: mod_base = OTHER; note = 2'-O-methyl modified nucleotide
  modified_base 26: mod_base = OTHER; note = 2'-O-methyl modified nucleotide
  modified_base 27: mod_base = OTHER; note = 2'-O-methyl modified nucleotide
  modified_base 28: mod_base = OTHER; note = 2'-O-methyl modified nucleotide
  modified_base 29: mod_base = OTHER; note = 2'-O-methyl modified nucleotide
  modified_base 30: mod_base = OTHER; note = 2'-O-methyl modified nucleotide
  modified_base 31: mod_base = OTHER; note = 2'-O-methyl modified nucleotide
  modified_base 32: mod_base = OTHER; note = 2'-O-methyl modified nucleotide
  modified_base 33: mod_base = OTHER; note = 2'-O-methyl modified nucleotide
  misc_difference 34: note = 2'-O-methyl modified nucleotide may be trivalent N-acetylgalactosamine modified
ncagtgtccaagctgaaaccagcttggacactga

SEQ ID NO: 1752 - RNA, 34 nt, synthetic construct
  source 1..34: mol_type = other RNA
  misc_difference 1: note = 2'-O-methyl modified nucleotide may be 5' phosphate modified
  modified_base 2: mod_base = OTHER; note = 2'-fluoro modified nucleotide
  modified_base 3: mod_base = OTHER; note = 2'-O-methyl modified nucleotide
  modified_base 4: mod_base = OTHER; note = 2'-O-methyl modified nucleotide
  modified_base 5: mod_base = OTHER; note = 2'-O-methyl modified nucleotide
  modified_base 6: mod_base = OTHER; note = 2'-O-methyl modified nucleotide
  modified_base 7: mod_base = OTHER; note = 2'-O-methyl modified nucleotide
  modified_base 8: mod_base = OTHER; note = 2'-O-methyl modified nucleotide
  modified_base 9: mod_base = OTHER; note = 2'-O-methyl modified nucleotide
  modified_base 10: mod_base = OTHER; note = 2'-O-methyl modified nucleotide
  modified_base 11: mod_base = OTHER; note = 2'-O-methyl modified nucleotide
  modified_base 12: mod_base = OTHER; note = 2'-O-methyl modified nucleotide
  modified_base 13: mod_base = OTHER; note = 2'-O-methyl modified nucleotide
  modified_base 14: mod_base = OTHER; note = 2'-fluoro modified nucleotide
  modified_base 15: mod_base = OTHER; note = 2'-O-methyl modified nucleotide
  modified_base 16: mod_base = OTHER; note = 2'-O-methyl modified nucleotide
  modified_base 17: mod_base = OTHER; note = 2'-O-methyl modified nucleotide
  modified_base 18: mod_base = OTHER; note = 2'-O-methyl modified nucleotide
  modified_base 19: mod_base = OTHER; note = 2'-O-methyl modified nucleotide
  modified_base 20: mod_base = OTHER; note = 2'-O-methyl modified nucleotide
  modified_base 21: mod_base = OTHER; note = 2'-O-methyl modified nucleotide
  modified_base 22: mod_base = OTHER; note = 2'-fluoro modified nucleotide
  modified_base 23: mod_base = OTHER; note = 2'-fluoro modified nucleotide
  modified_base 24: mod_base = OTHER; note = 2'-fluoro modified nucleotide
  modified_base 25: mod_base = OTHER; note = 2'-O-methyl modified nucleotide
  modified_base 26: mod_base = OTHER; note = 2'-O-methyl modified nucleotide
  modified_base 27: mod_base = OTHER; note = 2'-O-methyl modified nucleotide
  modified_base 28: mod_base = OTHER; note = 2'-O-methyl modified nucleotide
  modified_base 29: mod_base = OTHER; note = 2'-O-methyl modified nucleotide
  modified_base 30: mod_base = OTHER; note = 2'-O-methyl modified nucleotide
  modified_base 31: mod_base = OTHER; note = 2'-O-methyl modified nucleotide
  modified_base 32: mod_base = OTHER; note = 2'-O-methyl modified nucleotide
  modified_base 33: mod_base = OTHER; note = 2'-O-methyl modified nucleotide
  misc_difference 34: note = 2'-O-methyl modified nucleotide may be trivalent N-acetylgalactosamine modified
nccattcttgatgtagacctacatcaagaatgga

SEQ ID NO: 1753 - RNA, 34 nt, synthetic construct
  source 1..34: mol_type = other RNA
  misc_difference 1: note = 2'-O-methyl modified nucleotide may be 5' phosphate modified
  modified_base 2: mod_base = OTHER; note = 2'-fluoro modified nucleotide
  modified_base 3: mod_base = OTHER; note = 2'-O-methyl modified nucleotide
  modified_base 4: mod_base = OTHER; note = 2'-O-methyl modified nucleotide
  modified_base 5: mod_base = OTHER; note = 2'-O-methyl modified nucleotide
  modified_base 6: mod_base = OTHER; note = 2'-O-methyl modified nucleotide
  modified_base 7: mod_base = OTHER; note = 2'-O-methyl modified nucleotide
  modified_base 8: mod_base = OTHER; note = 2'-O-methyl modified nucleotide
  modified_base 9: mod_base = OTHER; note = 2'-O-methyl modified nucleotide
  modified_base 10: mod_base = OTHER; note = 2'-O-methyl modified nucleotide
  modified_base 11: mod_base = OTHER; note = 2'-O-methyl modified nucleotide
  modified_base 12: mod_base = OTHER; note = 2'-O-methyl modified nucleotide
  modified_base 13: mod_base = OTHER; note = 2'-O-methyl modified nucleotide
  modified_base 14: mod_base = OTHER; note = 2'-fluoro modified nucleotide
  modified_base 15: mod_base = OTHER; note = 2'-O-methyl modified nucleotide
  modified_base 16: mod_base = OTHER; note = 2'-O-methyl modified nucleotide
  modified_base 17: mod_base = OTHER; note = 2'-O-methyl modified nucleotide
  modified_base 18: mod_base = OTHER; note = 2'-O-methyl modified nucleotide
  modified_base 19: mod_base = OTHER; note = 2'-O-methyl modified nucleotide
  modified_base 20: mod_base = OTHER; note = 2'-O-methyl modified nucleotide
  modified_base 21: mod_base = OTHER; note = 2'-O-methyl modified nucleotide
  modified_base 22: mod_base = OTHER; note = 2'-fluoro modified nucleotide
  modified_base 23: mod_base = OTHER; note = 2'-fluoro modified nucleotide
  modified_base 24: mod_base = OTHER; note = 2'-fluoro modified nucleotide
  modified_base 25: mod_base = OTHER; note = 2'-O-methyl modified nucleotide
  modified_base 26: mod_base = OTHER; note = 2'-O-methyl modified nucleotide
  modified_base 27: mod_base = OTHER; note = 2'-O-methyl modified nucleotide
  modified_base 28: mod_base = OTHER; note = 2'-O-methyl modified nucleotide
  modified_base 29: mod_base = OTHER; note = 2'-O-methyl modified nucleotide
  modified_base 30: mod_base = OTHER; note = 2'-O-methyl modified nucleotide
  modified_base 31: mod_base = OTHER; note = 2'-O-methyl modified nucleotide
  modified_base 32: mod_base = OTHER; note = 2'-O-methyl modified nucleotide
  modified_base 33: mod_base = OTHER; note = 2'-O-methyl modified nucleotide
  misc_difference 34: note = 2'-O-methyl modified nucleotide may be trivalent N-acetylgalactosamine modified
naacaatgtgctgctgtcaagcagcacattgtta

SEQ ID NO: 1754 - RNA, 34 nt, synthetic construct
  source 1..34: mol_type = other RNA
  misc_difference 1: note = 2'-O-methyl modified nucleotide may be 5' phosphate modified
  modified_base 2: mod_base = OTHER; note = 2'-fluoro modified nucleotide
  modified_base 3: mod_base = OTHER; note = 2'-O-methyl modified nucleotide
  modified_base 4: mod_base = OTHER; note = 2'-O-methyl modified nucleotide
  modified_base 5: mod_base = OTHER; note = 2'-O-methyl modified nucleotide
  modified_base 6: mod_base = OTHER; note = 2'-O-methyl modified nucleotide
  modified_base 7: mod_base = OTHER; note = 2'-O-methyl modified nucleotide
  modified_base 8: mod_base = OTHER; note = 2'-O-methyl modified nucleotide
  modified_base 9: mod_base = OTHER; note = 2'-O-methyl modified nucleotide
  modified_base 10: mod_base = OTHER; note = 2'-O-methyl modified nucleotide
  modified_base 11: mod_base = OTHER; note = 2'-O-methyl modified nucleotide
  modified_base 12: mod_base = OTHER; note = 2'-O-methyl modified nucleotide
  modified_base 13: mod_base = OTHER; note = 2'-O-methyl modified nucleotide
  modified_base 14: mod_base = OTHER; note = 2'-fluoro modified nucleotide
  modified_base 15: mod_base = OTHER; note = 2'-O-methyl modified nucleotide
  modified_base 16: mod_base = OTHER; note = 2'-O-methyl modified nucleotide
  modified_base 17: mod_base = OTHER; note = 2'-O-methyl modified nucleotide
  modified_base 18: mod_base = OTHER; note = 2'-O-methyl modified nucleotide
  modified_base 19: mod_base = OTHER; note = 2'-O-methyl modified nucleotide
  modified_base 20: mod_base = OTHER; note = 2'-O-methyl modified nucleotide
  modified_base 21: mod_base = OTHER; note = 2'-O-methyl modified nucleotide
  modified_base 22: mod_base = OTHER; note = 2'-fluoro modified nucleotide
  modified_base 23: mod_base = OTHER; note = 2'-fluoro modified nucleotide
  modified_base 24: mod_base = OTHER; note = 2'-fluoro modified nucleotide
  modified_base 25: mod_base = OTHER; note = 2'-O-methyl modified nucleotide
  modified_base 26: mod_base = OTHER; note = 2'-O-methyl modified nucleotide
  modified_base 27: mod_base = OTHER; note = 2'-O-methyl modified nucleotide
  modified_base 28: mod_base = OTHER; note = 2'-O-methyl modified nucleotide
  modified_base 29: mod_base = OTHER; note = 2'-O-methyl modified nucleotide
  modified_base 30: mod_base = OTHER; note = 2'-O-methyl modified nucleotide
  modified_base 31: mod_base = OTHER; note = 2'-O-methyl modified nucleotide
  modified_base 32: mod_base = OTHER; note = 2'-O-methyl modified nucleotide
  modified_base 33: mod_base = OTHER; note = 2'-O-methyl modified nucleotide
  misc_difference 34: note = 2'-O-methyl modified nucleotide may be trivalent N-acetylgalactosamine modified
ngacttcaacttgtggtctcacaagttgaagtca

SEQ ID NO: 1755 - RNA, 30 nt, synthetic construct
  source 1..30: mol_type = other RNA
  misc_difference 1: note = 2'-O-methyl modified nucleotide may be 5' phosphate modified
  modified_base 2: mod_base = OTHER; note = 2'-fluoro modified nucleotide
  modified_base 3: mod_base = OTHER; note = 2'-O-methyl modified nucleotide
  modified_base 4: mod_base = OTHER; note = 2'-fluoro modified nucleotide
  modified_base 5: mod_base = OTHER; note = 2'-O-methyl modified nucleotide
  modified_base 6: mod_base = OTHER; note = 2'-fluoro modified nucleotide
  modified_base 7: mod_base = OTHER; note = 2'-O-methyl modified nucleotide
  modified_base 8: mod_base = OTHER; note = 2'-fluoro modified nucleotide
  modified_base 9: mod_base = OTHER; note = 2'-O-methyl modified nucleotide
  modified_base 10: mod_base = OTHER; note = 2'-fluoro modified nucleotide
  modified_base 11: mod_base = OTHER; note = 2'-O-methyl modified nucleotide
  modified_base 12: mod_base = OTHER; note = 2'-fluoro modified nucleotide
  modified_base 13: mod_base = OTHER; note = 2'-O-methyl modified nucleotide
  modified_base 14: mod_base = OTHER; note = 2'-fluoro modified nucleotide
  modified_base 15: mod_base = OTHER; note = 2'-O-methyl modified nucleotide
  modified_base 16: mod_base = OTHER; note = 2'-fluoro modified nucleotide
  modified_base 17: mod_base = OTHER; note = 2'-O-methyl modified nucleotide
  modified_base 18: mod_base = OTHER; note = 2'-fluoro modified nucleotide
  modified_base 19: mod_base = OTHER; note = 2'-O-methyl modified nucleotide
  modified_base 20: mod_base = OTHER; note = 2'-fluoro modified nucleotide
  modified_base 21: mod_base = OTHER; note = 2'-O-methyl modified nucleotide
  modified_base 22: mod_base = OTHER; note = 2'-fluoro modified nucleotide
  modified_base 23: mod_base = OTHER; note = 2'-O-methyl modified nucleotide
  modified_base 24: mod_base = OTHER; note = 2'-fluoro modified nucleotide
  modified_base 25: mod_base = OTHER; note = 2'-O-methyl modified nucleotide
  modified_base 26: mod_base = OTHER; note = 2'-fluoro modified nucleotide
  modified_base 27: mod_base = OTHER; note = 2'-O-methyl modified nucleotide
  modified_base 28: mod_base = OTHER; note = 2'-fluoro modified nucleotide
  modified_base 29: mod_base = OTHER; note = 2'-O-methyl modified nucleotide
  misc_difference 30: note = 2'-fluoro modified nucleotide may be trivalent N-Acetylgalactosamine modified
ntgaatgaaacgacttctcgtttcattcaa

SEQ ID NO: 1756 - RNA, 33 nt, synthetic construct
  source 1..33: mol_type = other RNA
  misc_difference 1: note = 2'-O-methyl modified nucleotide may be 5' phosphate modified
  modified_base 2: mod_base = OTHER; note = 2'-fluoro modified nucleotide
  modified_base 3: mod_base = OTHER; note = 2'-O-methyl modified nucleotide
  modified_base 4: mod_base = OTHER; note = 2'-O-methyl modified nucleotide
  modified_base 5: mod_base = OTHER; note = 2'-O-methyl modified nucleotide
  modified_base 6: mod_base = OTHER; note = 2'-O-methyl modified nucleotide
  modified_base 7: mod_base = OTHER; note = 2'-O-methyl modified nucleotide
  modified_base 8: mod_base = OTHER; note = 2'-O-methyl modified nucleotide
  modified_base 9: mod_base = OTHER; note = 2'-O-methyl modified nucleotide
  modified_base 10: mod_base = OTHER; note = 2'-O-methyl modified nucleotide
  modified_base 11: mod_base = OTHER; note = 2'-O-methyl modified nucleotide
  modified_base 12: mod_base = OTHER; note = 2'-O-methyl modified nucleotide
  modified_base 13: mod_base = OTHER; note = 2'-O-methyl modified nucleotide
  modified_base 14: mod_base = OTHER; note = 2'-fluoro modified nucleotide
  modified_base 15: mod_base = OTHER; note = 2'-O-methyl modified nucleotide
  modified_base 16: mod_base = OTHER; note = 2'-O-methyl modified nucleotide
  modified_base 17: mod_base = OTHER; note = 2'-O-methyl modified nucleotide
  modified_base 18: mod_base = OTHER; note = 2'-O-methyl modified nucleotide
  modified_base 19: mod_base = OTHER; note = 2'-O-methyl modified nucleotide
  modified_base 20: mod_base = OTHER; note = 2'-O-methyl modified nucleotide
  modified_base 21: mod_base = OTHER; note = 2'-fluoro modified nucleotide
  modified_base 22: mod_base = OTHER; note = 2'-fluoro modified nucleotide
  modified_base 23: mod_base = OTHER; note = 2'-fluoro modified nucleotide
  modified_base 24: mod_base = OTHER; note = 2'-O-methyl modified nucleotide
  modified_base 25: mod_base = OTHER; note = 2'-O-methyl modified nucleotide
  modified_base 26: mod_base = OTHER; note = 2'-O-methyl modified nucleotide
  modified_base 27: mod_base = OTHER; note = 2'-O-methyl modified nucleotide
  modified_base 28: mod_base = OTHER; note = 2'-O-methyl modified nucleotide
  modified_base 29: mod_base = OTHER; note = 2'-O-methyl modified nucleotide
  modified_base 30: mod_base = OTHER; note = 2'-O-methyl modified nucleotide
  modified_base 31: mod_base = OTHER; note = 2'-O-methyl modified nucleotide
  modified_base 32: mod_base = OTHER; note = 2'-O-methyl modified nucleotide
  misc_difference 33: note = 2'-O-methyl modified nucleotide may be trivalent N-Acetylgalactosamine modified
ntgccacagagactcagagagtctctgtggcaa

SEQ ID NO: 1757 - RNA, 33 nt, synthetic construct; identical to SEQ ID NO: 1756
  source 1..33: mol_type = other RNA
  modified_base 1: mod_base = OTHER; note = 2'-O-methyl modified nucleotide with phosphorothioate linkage
  modified_base 2: mod_base = OTHER; note = 2'-fluoro modified nucleotide with phosphorothioate linkage
  modified_base 3: mod_base = OTHER; note = 2'-O-methyl modified nucleotide
  modified_base 4: mod_base = OTHER; note = 2'-O-methyl modified nucleotide
  modified_base 5: mod_base = OTHER; note = 2'-O-methyl modified nucleotide
  modified_base 6: mod_base = OTHER; note = 2'-O-methyl modified nucleotide
  modified_base 7: mod_base = OTHER; note = 2'-O-methyl modified nucleotide
  modified_base 8: mod_base = OTHER; note = 2'-O-methyl modified nucleotide
  modified_base 9: mod_base = OTHER; note = 2'-O-methyl modified nucleotide
  modified_base 10: mod_base = OTHER; note = 2'-O-methyl modified nucleotide
  modified_base 11: mod_base = OTHER; note = 2'-O-methyl modified nucleotide
  modified_base 12: mod_base = OTHER; note = 2'-O-methyl modified nucleotide
  modified_base 13: mod_base = OTHER; note = 2'-O-methyl modified nucleotide
  modified_base 14: mod_base = OTHER; note = 2'-fluoro modified nucleotide with phosphorothioate linkage
  modified_base 15: mod_base = OTHER; note = 2'-O-methyl modified nucleotide with phosphorothioate linkage
  modified_base 16: mod_base = OTHER; note = 2'-O-methyl modified nucleotide with phosphorothioate linkage
  modified_base 17: mod_base = OTHER; note = 2'-O-methyl modified nucleotide with phosphorothioate linkage
  modified_base 18: mod_base = OTHER; note = 2'-O-methyl modified nucleotide with phosphorothioate linkage
  modified_base 19: mod_base = OTHER; note = 2'-O-methyl modified nucleotide with phosphorothioate linkage
  modified_base 20: mod_base = OTHER; note = 2'-O-methyl modified nucleotide
  modified_base 21: mod_base = OTHER; note = 2'-fluoro modified nucleotide
  modified_base 22: mod_base = OTHER; note = 2'-fluoro modified nucleotide
  modified_base 23: mod_base = OTHER; note = 2'-fluoro modified nucleotide
  modified_base 24: mod_base = OTHER; note = 2'-O-methyl modified nucleotide
  modified_base 25: mod_base = OTHER; note = 2'-O-methyl modified nucleotide
  modified_base 26: mod_base = OTHER; note = 2'-O-methyl modified nucleotide
  modified_base 27: mod_base = OTHER; note = 2'-O-methyl modified nucleotide
  modified_base 28: mod_base = OTHER; note = 2'-O-methyl modified nucleotide
  modified_base 29: mod_base = OTHER; note = 2'-O-methyl modified nucleotide
  modified_base 30: mod_base = OTHER; note = 2'-O-methyl modified nucleotide
  modified_base 31: mod_base = OTHER; note = 2'-O-methyl modified nucleotide with phosphorothioate linkage
  modified_base 32: mod_base = OTHER; note = 2'-O-methyl modified nucleotide with phosphorothioate linkage
  modified_base 33: mod_base = OTHER; note = 2'-O-methyl modified nucleotide with phosphorothioate linkage attached to Sirnaomics N-acetylgalactosamine Sirnaomics N-acetylgalactosamine Sirnaomics N-acetylgalactosamine

SEQ ID NO: 1758 - RNA, 30 nt, synthetic construct; identical to SEQ ID NO: 1755
  source 1..30: mol_type = other RNA
  modified_base 1: mod_base = OTHER; note = 2'-O-methyl modified nucleotide with phosphorothioate linkage
  modified_base 2: mod_base = OTHER; note = 2'-fluoro modified nucleotide with phosphorothioate linkage
  modified_base 3: mod_base = OTHER; note = 2'-O-methyl modified nucleotide
  modified_base 4: mod_base = OTHER; note = 2'-fluoro modified nucleotide
  modified_base 5: mod_base = OTHER; note = 2'-O-methyl modified nucleotide
  modified_base 6: mod_base = OTHER; note = 2'-fluoro modified nucleotide
  modified_base 7: mod_base = OTHER; note = 2'-O-methyl modified nucleotide
  modified_base 8: mod_base = OTHER; note = 2'-fluoro modified nucleotide
  modified_base 9: mod_base = OTHER; note = 2'-O-methyl modified nucleotide
  modified_base 10: mod_base = OTHER; note = 2'-fluoro modified nucleotide
  modified_base 11: mod_base = OTHER; note = 2'-O-methyl modified nucleotide
  modified_base 12: mod_base = OTHER; note = 2'-fluoro modified nucleotide
  modified_base 13: mod_base = OTHER; note = 2'-O-methyl modified nucleotide with phosphorothioate linkage
  modified_base 14: mod_base = OTHER; note = 2'-fluoro modified nucleotide with phosphorothioate linkage
  modified_base 15: mod_base = OTHER; note = 2'-O-methyl modified nucleotide with phosphorothioate linkage
  modified_base 16: mod_base = OTHER; note = 2'-fluoro modified nucleotide with phosphorothioate linkage
  modified_base 17: mod_base = OTHER; note = 2'-O-methyl modified nucleotide with phosphorothioate linkage
  modified_base 18: mod_base = OTHER; note = 2'-fluoro modified nucleotide with phosphorothioate linkage
  modified_base 19: mod_base = OTHER; note = 2'-O-methyl modified nucleotide
  modified_base 20: mod_base = OTHER; note = 2'-fluoro modified nucleotide
  modified_base 21: mod_base = OTHER; note = 2'-O-methyl modified nucleotide
  modified_base 22: mod_base = OTHER; note = 2'-fluoro modified nucleotide
  modified_base 23: mod_base = OTHER; note = 2'-O-methyl modified nucleotide
  modified_base 24: mod_base = OTHER; note = 2'-fluoro modified nucleotide
  modified_base 25: mod_base = OTHER; note = 2'-O-methyl modified nucleotide
  modified_base 26: mod_base = OTHER; note = 2'-fluoro modified nucleotide
  modified_base 27: mod_base = OTHER; note = 2'-O-methyl modified nucleotide
  modified_base 28: mod_base = OTHER; note = 2'-fluoro modified nucleotide with phosphorothioate linkage
  modified_base 29: mod_base = OTHER; note = 2'-O-methyl modified nucleotide with phosphorothioate linkage
  modified_base 30: mod_base = OTHER; note = 2'-fluoro modified nucleotide with phosphorothioate linkage attached to Sirnaomics N-acetylgalactosamine Sirnaomics N-acetylgalactosamine Sirnaomics N-acetylgalactosamine

SEQ ID NO: 1759 - RNA, 19 nt, synthetic construct
  source 1..19: mol_type = other RNA
  misc_difference 1: note = 2'-O-methyl modified nucleotide with phosphorothioate linkage may be 5' phosphate modified
  modified_base 2: mod_base = OTHER; note = 2'-fluoro modified nucleotide with phosphorothioate linkage
  modified_base 3: mod_base = OTHER; note = 2'-O-methyl modified nucleotide
  modified_base 4: mod_base = OTHER; note = 2'-fluoro modified nucleotide
  modified_base 5: mod_base = OTHER; note = 2'-O-methyl modified nucleotide
  modified_base 6: mod_base = OTHER; note = 2'-fluoro modified nucleotide
  modified_base 7: mod_base = OTHER; note = 2'-O-methyl modified nucleotide
  modified_base 8: mod_base = OTHER; note = 2'-fluoro modified nucleotide
  modified_base 9: mod_base = OTHER; note = 2'-O-methyl modified nucleotide
  modified_base 10: mod_base = OTHER; note = 2'-fluoro modified nucleotide
  modified_base 11: mod_base = OTHER; note = 2'-O-methyl modified nucleotide
  modified_base 12: mod_base = OTHER; note = 2'-fluoro modified nucleotide
  modified_base 13: mod_base = OTHER; note = 2'-O-methyl modified nucleotide
  modified_base 14: mod_base = OTHER; note = 2'-fluoro modified nucleotide with phosphorothioate linkage
  modified_base 15: mod_base = OTHER; note = 2'-O-methyl modified nucleotide with phosphorothioate linkage
  modified_base 16: mod_base = OTHER; note = 2'-fluoro modified nucleotide with phosphorothioate linkage
  modified_base 17: mod_base = OTHER; note = 2'-O-methyl modified nucleotide with phosphorothioate linkage
  modified_base 18: mod_base = OTHER; note = 2'-fluoro modified nucleotide with phosphorothioate linkage
  misc_difference 19: note = 2'-O-methyl modified nucleotide may be trivalent N-acetylgalactosamine modified
ncacagtttggcctggaga

SEQ ID NO: 1760 - RNA, 19 nt, synthetic construct
  source 1..19: mol_type = other RNA
  misc_difference 1: note = 2'-O-methyl modified nucleotide with phosphorothioate linkage may be 5' phosphate modified
  modified_base 2: mod_base = OTHER; note = 2'-fluoro modified nucleotide with phosphorothioate linkage
  modified_base 3: mod_base = OTHER; note = 2'-O-methyl modified nucleotide
  modified_base 4: mod_base = OTHER; note = 2'-fluoro modified nucleotide
  modified_base 5: mod_base = OTHER; note = 2'-O-methyl modified nucleotide
  modified_base 6: mod_base = OTHER; note = 2'-fluoro modified nucleotide
  modified_base 7: mod_base = OTHER; note = 2'-O-methyl modified nucleotide
  modified_base 8: mod_base = OTHER; note = 2'-fluoro modified nucleotide
  modified_base 9: mod_base = OTHER; note = 2'-O-methyl modified nucleotide
  modified_base 10: mod_base = OTHER; note = 2'-fluoro modified nucleotide
  modified_base 11: mod_base = OTHER; note = 2'-O-methyl modified nucleotide
  modified_base 12: mod_base = OTHER; note = 2'-fluoro modified nucleotide
  modified_base 13: mod_base = OTHER; note = 2'-O-methyl modified nucleotide
  modified_base 14: mod_base = OTHER; note = 2'-fluoro modified nucleotide with phosphorothioate linkage
  modified_base 15: mod_base = OTHER; note = 2'-O-methyl modified nucleotide with phosphorothioate linkage
  modified_base 16: mod_base = OTHER; note = 2'-fluoro modified nucleotide with phosphorothioate linkage
  modified_base 17: mod_base = OTHER; note = 2'-O-methyl modified nucleotide with phosphorothioate linkage
  modified_base 18: mod_base = OTHER; note = 2'-fluoro modified nucleotide with phosphorothioate linkage
  misc_difference 19: note = 2'-O-methyl modified nucleotide may be trivalent N-acetylgalactosamine modified
ngaatcttgaagtcaggaa

SEQ ID NO: 1761 - RNA, 19 nt, synthetic construct
  source 1..19: mol_type = other RNA
  misc_difference 1: note = 2'-O-methyl modified nucleotide with phosphorothioate linkage may be 5' phosphate modified
  modified_base 2: mod_base = OTHER; note = 2'-fluoro modified nucleotide with phosphorothioate linkage
  modified_base 3: mod_base = OTHER; note = 2'-O-methyl modified nucleotide
  modified_base 4: mod_base = OTHER; note = 2'-fluoro modified nucleotide
  modified_base 5: mod_base = OTHER; note = 2'-O-methyl modified nucleotide
  modified_base 6: mod_base = OTHER; note = 2'-fluoro modified nucleotide
  modified_base 7: mod_base = OTHER; note = 2'-O-methyl modified nucleotide
  modified_base 8: mod_base = OTHER; note = 2'-fluoro modified nucleotide
  modified_base 9: mod_base = OTHER; note = 2'-O-methyl modified nucleotide
  modified_base 10: mod_base = OTHER; note = 2'-fluoro modified nucleotide
  modified_base 11: mod_base = OTHER; note = 2'-O-methyl modified nucleotide
  modified_base 12: mod_base = OTHER; note = 2'-fluoro modified nucleotide
  modified_base 13: mod_base = OTHER; note = 2'-O-methyl modified nucleotide
  modified_base 14: mod_base = OTHER; note = 2'-fluoro modified nucleotide with phosphorothioate linkage
  modified_base 15: mod_base = OTHER; note = 2'-O-methyl modified nucleotide with phosphorothioate linkage
  modified_base 16: mod_base = OTHER; note = 2'-fluoro modified nucleotide with phosphorothioate linkage
  modified_base 17: mod_base = OTHER; note = 2'-O-methyl modified nucleotide with phosphorothioate linkage
  modified_base 18: mod_base = OTHER; note = 2'-fluoro modified nucleotide with phosphorothioate linkage
  misc_difference 19: note = 2'-O-methyl modified nucleotide may be trivalent N-acetylgalactosamine modified
ntgggcttgtagctggcac

SEQ ID NO: 1762 - RNA, 19 nt, synthetic construct
  source 1..19: mol_type = other RNA
  misc_difference 1: note = 2'-O-methyl modified nucleotide with phosphorothioate linkage may be 5' phosphate modified
  modified_base 2: mod_base = OTHER; note = 2'-fluoro modified nucleotide with phosphorothioate linkage
  modified_base 3: mod_base = OTHER; note = 2'-O-methyl modified nucleotide
  modified_base 4: mod_base = OTHER; note = 2'-fluoro modified nucleotide
  modified_base 5: mod_base = OTHER; note = 2'-O-methyl modified nucleotide
  modified_base 6: mod_base = OTHER; note = 2'-fluoro modified nucleotide
  modified_base 7: mod_base = OTHER; note = 2'-O-methyl modified nucleotide
  modified_base 8: mod_base = OTHER; note = 2'-fluoro modified nucleotide
  modified_base 9: mod_base = OTHER; note = 2'-O-methyl modified nucleotide
  modified_base 10: mod_base = OTHER; note = 2'-fluoro modified nucleotide
  modified_base 11: mod_base = OTHER; note = 2'-O-methyl modified nucleotide
  modified_base 12: mod_base = OTHER; note = 2'-fluoro modified nucleotide
  modified_base 13: mod_base = OTHER; note = 2'-O-methyl modified nucleotide
  modified_base 14: mod_base = OTHER; note = 2'-fluoro modified nucleotide with phosphorothioate linkage
  modified_base 15: mod_base = OTHER; note = 2'-O-methyl modified nucleotide with phosphorothioate linkage
  modified_base 16: mod_base = OTHER; note = 2'-fluoro modified nucleotide with phosphorothioate linkage
  modified_base 17: mod_base = OTHER; note = 2'-O-methyl modified nucleotide with phosphorothioate linkage
  modified_base 18: mod_base = OTHER; note = 2'-fluoro modified nucleotide with phosphorothioate linkage
  misc_difference 19: note = 2'-O-methyl modified nucleotide may be trivalent N-acetylgalactosamine modified
ncaagtaattatagtgagt

SEQ ID NO: 1763 - RNA, 19 nt, synthetic construct
  source 1..19: mol_type = other RNA
  misc_difference 1: note = 2'-O-methyl modified nucleotide with phosphorothioate linkage may be 5' phosphate modified
  modified_base 2: mod_base = OTHER; note = 2'-fluoro modified nucleotide with phosphorothioate linkage
  modified_base 3: mod_base = OTHER; note = 2'-O-methyl modified nucleotide
  modified_base 4: mod_base = OTHER; note = 2'-fluoro modified nucleotide
  modified_base 5: mod_base = OTHER; note = 2'-O-methyl modified nucleotide
  modified_base 6: mod_base = OTHER; note = 2'-fluoro modified nucleotide
  modified_base 7: mod_base = OTHER; note = 2'-O-methyl modified nucleotide
  modified_base 8: mod_base = OTHER; note = 2'-fluoro modified nucleotide
  modified_base 9: mod_base = OTHER; note = 2'-O-methyl modified nucleotide
  modified_base 10: mod_base = OTHER; note = 2'-fluoro modified nucleotide
  modified_base 11: mod_base = OTHER; note = 2'-O-methyl modified nucleotide
  modified_base 12: mod_base = OTHER; note = 2'-fluoro modified nucleotide
  modified_base 13: mod_base = OTHER; note = 2'-O-methyl modified nucleotide
  modified_base 14: mod_base = OTHER; note = 2'-fluoro modified nucleotide with phosphorothioate linkage
  modified_base 15: mod_base = OTHER; note = 2'-O-methyl modified nucleotide with phosphorothioate linkage
  modified_base 16: mod_base = OTHER; note = 2'-fluoro modified nucleotide with phosphorothioate linkage
  modified_base 17: mod_base = OTHER; note = 2'-O-methyl modified nucleotide with phosphorothioate linkage
  modified_base 18: mod_base = OTHER; note = 2'-fluoro modified nucleotide with phosphorothioate linkage
  misc_difference 19: note = 2'-O-methyl modified nucleotide may be trivalent N-acetylgalactosamine modified
naacaggtttgtctgtatg

SEQ ID NO: 1764 - RNA, 19 nt, synthetic construct
  source 1..19: mol_type = other RNA
  misc_difference 1: note = 2'-O-methyl modified nucleotide with phosphorothioate linkage may be 5' phosphate modified
  modified_base 2: mod_base = OTHER; note = 2'-fluoro modified nucleotide with phosphorothioate linkage
  modified_base 3: mod_base = OTHER; note = 2'-O-methyl modified nucleotide
  modified_base 4: mod_base = OTHER; note = 2'-fluoro modified nucleotide
  modified_base 5: mod_base = OTHER; note = 2'-O-methyl modified nucleotide
  modified_base 6: mod_base = OTHER; note = 2'-fluoro modified nucleotide
  modified_base 7: mod_base = OTHER; note = 2'-O-methyl modified nucleotide
  modified_base 8: mod_base = OTHER; note = 2'-fluoro modified nucleotide
  modified_base 9: mod_base = OTHER; note = 2'-O-methyl modified nucleotide
  modified_base 10: mod_base = OTHER; note = 2'-fluoro modified nucleotide
  modified_base 11: mod_base = OTHER; note = 2'-O-methyl modified nucleotide
  modified_base 12: mod_base = OTHER; note = 2'-fluoro modified nucleotide
  modified_base 13: mod_base = OTHER; note = 2'-O-methyl modified nucleotide
  modified_base 14: mod_base = OTHER; note = 2'-fluoro modified nucleotide with phosphorothioate linkage
  modified_base 15: mod_base = OTHER; note = 2'-O-methyl modified nucleotide with phosphorothioate linkage
  modified_base 16: mod_base = OTHER; note = 2'-fluoro modified nucleotide with phosphorothioate linkage
  modified_base 17: mod_base = OTHER; note = 2'-O-methyl modified nucleotide with phosphorothioate linkage
  modified_base 18: mod_base = OTHER; note = 2'-fluoro modified nucleotide with phosphorothioate linkage
  misc_difference 19: note = 2'-O-methyl modified nucleotide may be trivalent N-acetylgalactosamine modified
ncagacattttaacacaga

SEQ ID NO: 1765 - RNA, 19 nt, synthetic construct
  source 1..19: mol_type = other RNA
  misc_difference 1: note = 2'-O-methyl modified nucleotide with phosphorothioate linkage may be 5' phosphate modified
  modified_base 2: mod_base = OTHER; note = 2'-fluoro modified nucleotide with phosphorothioate linkage
  modified_base 3: mod_base = OTHER; note = 2'-O-methyl modified nucleotide
  modified_base 4: mod_base = OTHER; note = 2'-fluoro modified nucleotide
  modified_base 5: mod_base = OTHER; note = 2'-O-methyl modified nucleotide
  modified_base 6: mod_base = OTHER; note = 2'-fluoro modified nucleotide
  modified_base 7: mod_base = OTHER; note = 2'-O-methyl modified nucleotide
  modified_base 8: mod_base = OTHER; note = 2'-fluoro modified nucleotide
  modified_base 9: mod_base = OTHER; note = 2'-O-methyl modified nucleotide
  modified_base 10: mod_base = OTHER; note = 2'-fluoro modified nucleotide
  modified_base 11: mod_base = OTHER; note = 2'-O-methyl modified nucleotide
  modified_base 12: mod_base = OTHER; note = 2'-fluoro modified nucleotide
  modified_base 13: mod_base = OTHER; note = 2'-O-methyl modified nucleotide
  modified_base 14: mod_base = OTHER; note = 2'-fluoro modified nucleotide with phosphorothioate linkage
  modified_base 15: mod_base = OTHER; note = 2'-O-methyl modified nucleotide with phosphorothioate linkage
  modified_base 16: mod_base = OTHER; note = 2'-fluoro modified nucleotide with phosphorothioate linkage
  modified_base 17: mod_base = OTHER; note = 2'-O-methyl modified nucleotide with phosphorothioate linkage
  modified_base 18: mod_base = OTHER; note = 2'-fluoro modified nucleotide with phosphorothioate linkage
  misc_difference 19: note = 2'-O-methyl modified nucleotide may be trivalent N-acetylgalactosamine modified
ncctggagctggttgccac

SEQ ID NO: 1766 - RNA, 19 nt, synthetic construct
  source 1..19: mol_type = other RNA
  misc_difference 1: note = 2'-O-methyl modified nucleotide with phosphorothioate linkage may be 5' phosphate modified
  modified_base 2: mod_base = OTHER; note = 2'-fluoro modified nucleotide with phosphorothioate linkage
  modified_base 3: mod_base = OTHER; note = 2'-O-methyl modified nucleotide
  modified_base 4: mod_base = OTHER; note = 2'-fluoro modified nucleotide
  modified_base 5: mod_base = OTHER; note = 2'-O-methyl modified nucleotide
  modified_base 6: mod_base = OTHER; note = 2'-fluoro modified nucleotide
  modified_base 7: mod_base = OTHER; note = 2'-O-methyl modified nucleotide
  modified_base 8: mod_base = OTHER; note = 2'-fluoro modified nucleotide
  modified_base 9: mod_base = OTHER; note = 2'-O-methyl modified nucleotide
  modified_base 10: mod_base = OTHER; note = 2'-fluoro modified nucleotide
  modified_base 11: mod_base = OTHER; note = 2'-O-methyl modified nucleotide
  modified_base 12: mod_base = OTHER; note = 2'-fluoro modified nucleotide
  modified_base 13: mod_base = OTHER; note = 2'-O-methyl modified nucleotide
  modified_base 14: mod_base = OTHER; note = 2'-fluoro modified nucleotide with phosphorothioate linkage
  modified_base 15: mod_base = OTHER; note = 2'-O-methyl modified nucleotide with phosphorothioate linkage
  modified_base 16: mod_base = OTHER; note = 2'-fluoro modified nucleotide with phosphorothioate linkage
  modified_base 17: mod_base = OTHER; note = 2'-O-methyl modified nucleotide with phosphorothioate linkage
  modified_base 18: mod_base = OTHER; note = 2'-fluoro modified nucleotide with phosphorothioate linkage
  misc_difference 19: note = 2'-O-methyl modified nucleotide may be trivalent N-acetylgalactosamine modified
nataaaatcaagtaattat

SEQ ID NO: 1767 - RNA, 19 nt, synthetic construct
  source 1..19: mol_type = other RNA
  misc_difference 1: note = 2'-O-methyl modified nucleotide with phosphorothioate linkage may be 5' phosphate modified
  modified_base 2: mod_base = OTHER; note = 2'-fluoro modified nucleotide with phosphorothioate linkage
  modified_base 3: mod_base = OTHER; note = 2'-O-methyl modified nucleotide
  modified_base 4: mod_base = OTHER; note = 2'-fluoro modified nucleotide
  modified_base 5: mod_base = OTHER; note = 2'-O-methyl modified nucleotide
  modified_base 6: mod_base = OTHER; note = 2'-fluoro modified nucleotide
  modified_base 7: mod_base = OTHER; note = 2'-O-methyl modified nucleotide
  modified_base 8: mod_base = OTHER; note = 2'-fluoro modified nucleotide
  modified_base 9: mod_base = OTHER; note = 2'-O-methyl modified nucleotide
  modified_base 10: mod_base = OTHER; note = 2'-fluoro modified nucleotide
  modified_base 11: mod_base = OTHER; note = 2'-O-methyl modified nucleotide
  modified_base 12: mod_base = OTHER; note = 2'-fluoro modified nucleotide
  modified_base 13: mod_base = OTHER; note = 2'-O-methyl modified nucleotide
  modified_base 14: mod_base = OTHER; note = 2'-fluoro modified nucleotide with phosphorothioate linkage
  modified_base 15: mod_base = OTHER; note = 2'-O-methyl modified nucleotide with phosphorothioate linkage
  modified_base 16: mod_base = OTHER; note = 2'-fluoro modified nucleotide with phosphorothioate linkage
  modified_base 17: mod_base = OTHER; note = 2'-O-methyl modified nucleotide with phosphorothioate linkage
  modified_base 18: mod_base = OTHER; note = 2'-fluoro modified nucleotide with phosphorothioate linkage
  misc_difference 19: note = 2'-O-methyl modified nucleotide may be trivalent N-acetylgalactosamine modified
nacacagtttggcctggag

SEQ ID NO: 1768 - RNA, 19 nt, synthetic construct
  source 1..19: mol_type = other RNA
  misc_difference 1: note = 2'-O-methyl modified nucleotide with phosphorothioate linkage may be 5' phosphate modified
  modified_base 2: mod_base = OTHER; note = 2'-fluoro modified nucleotide with phosphorothioate linkage
  modified_base 3: mod_base = OTHER; note = 2'-O-methyl modified nucleotide
  modified_base 4: mod_base = OTHER; note = 2'-fluoro modified nucleotide
  modified_base 5: mod_base = OTHER; note = 2'-O-methyl modified nucleotide
  modified_base 6: mod_base = OTHER; note = 2'-fluoro modified nucleotide
  modified_base 7: mod_base = OTHER; note = 2'-O-methyl modified nucleotide
  modified_base 8: mod_base = OTHER; note = 2'-fluoro modified nucleotide
  modified_base 9: mod_base = OTHER; note = 2'-O-methyl modified nucleotide
  modified_base 10: mod_base = OTHER; note = 2'-fluoro modified nucleotide
  modified_base 11: mod_base = OTHER; note = 2'-O-methyl modified nucleotide
  modified_base 12: mod_base = OTHER; note = 2'-fluoro modified nucleotide
  modified_base 13: mod_base = OTHER; note = 2'-O-methyl modified nucleotide
  modified_base 14: mod_base = OTHER; note = 2'-fluoro modified nucleotide with phosphorothioate linkage
  modified_base 15: mod_base = OTHER; note = 2'-O-methyl modified nucleotide with phosphorothioate linkage
  modified_base 16: mod_base = OTHER; note = 2'-fluoro modified nucleotide with phosphorothioate linkage
  modified_base 17: mod_base = OTHER; note = 2'-O-methyl modified nucleotide with phosphorothioate linkage
  modified_base 18: mod_base = OTHER; note = 2'-fluoro modified nucleotide with phosphorothioate linkage
  misc_difference 19: note = 2'-O-methyl modified nucleotide may be trivalent N-acetylgalactosamine modified
nggaatcttgaagtcagga

SEQ ID NO: 1769 - RNA, 19 nt, synthetic construct
  source 1..19: mol_type = other RNA
  misc_difference 1: note = 2'-O-methyl modified nucleotide with phosphorothioate linkage may be 5' phosphate modified
  modified_base 2: mod_base = OTHER; note = 2'-fluoro modified nucleotide with phosphorothioate linkage
  modified_base 3: mod_base = OTHER; note = 2'-O-methyl modified nucleotide
  modified_base 4: mod_base = OTHER; note = 2'-fluoro modified nucleotide
  modified_base 5: mod_base = OTHER; note = 2'-O-methyl modified nucleotide
  modified_base 6: mod_base = OTHER; note = 2'-fluoro modified nucleotide
  modified_base 7: mod_base = OTHER; note = 2'-O-methyl modified nucleotide
  modified_base 8: mod_base = OTHER; note = 2'-fluoro modified nucleotide
  modified_base 9: mod_base = OTHER; note = 2'-O-methyl modified nucleotide
  modified_base 10: mod_base = OTHER; note = 2'-fluoro modified nucleotide
  modified_base 11: mod_base = OTHER; note = 2'-O-methyl modified nucleotide
  modified_base 12: mod_base = OTHER; note = 2'-fluoro modified nucleotide
  modified_base 13: mod_base = OTHER; note = 2'-O-methyl modified nucleotide
  modified_base 14: mod_base = OTHER; note = 2'-fluoro modified nucleotide with phosphorothioate linkage
  modified_base 15: mod_base = OTHER; note = 2'-O-methyl modified nucleotide with phosphorothioate linkage
  modified_base 16: mod_base = OTHER; note = 2'-fluoro modified nucleotide with phosphorothioate linkage
  modified_base 17: mod_base = OTHER; note = 2'-O-methyl modified nucleotide with phosphorothioate linkage
  modified_base 18: mod_base = OTHER; note = 2'-fluoro modified nucleotide with phosphorothioate linkage
  misc_difference 19: note = 2'-O-methyl modified nucleotide may be trivalent N-acetylgalactosamine modified
ngacattttaacacagaac

SEQ ID NO: 1770 - RNA, 19 nt, synthetic construct
  source 1..19: mol_type = other RNA
  misc_difference 1: note = 2'-O-methyl modified nucleotide with phosphorothioate linkage may be 5' phosphate modified
  modified_base 2: mod_base = OTHER; note = 2'-fluoro modified nucleotide with phosphorothioate linkage
  modified_base 3: mod_base = OTHER; note = 2'-O-methyl modified nucleotide
  modified_base 4: mod_base = OTHER; note = 2'-fluoro modified nucleotide
  modified_base 5: mod_base = OTHER; note = 2'-O-methyl modified nucleotide
  modified_base 6: mod_base = OTHER; note = 2'-fluoro modified nucleotide
  modified_base 7: mod_base = OTHER; note = 2'-O-methyl modified nucleotide
  modified_base 8: mod_base = OTHER; note = 2'-fluoro modified nucleotide
  modified_base 9: mod_base = OTHER; note = 2'-O-methyl modified nucleotide
  modified_base 10: mod_base = OTHER; note = 2'-fluoro modified nucleotide
  modified_base 11: mod_base = OTHER; note = 2'-O-methyl modified nucleotide
  modified_base 12: mod_base = OTHER; note = 2'-fluoro modified nucleotide
  modified_base 13: mod_base = OTHER; note = 2'-O-methyl modified nucleotide
  modified_base 14: mod_base = OTHER; note = 2'-fluoro modified nucleotide with phosphorothioate linkage
  modified_base 15: mod_base = OTHER; note = 2'-O-methyl modified nucleotide with phosphorothioate linkage
  modified_base 16: mod_base = OTHER; note = 2'-fluoro modified nucleotide with phosphorothioate linkage
  modified_base 17: mod_base = OTHER; note = 2'-O-methyl modified nucleotide with phosphorothioate linkage
  modified_base 18: mod_base = OTHER; note = 2'-fluoro modified nucleotide with phosphorothioate linkage
  misc_difference 19: note = 2'-O-methyl modified nucleotide may be trivalent N-acetylgalactosamine modified
ngaagtcaggaaaagagat

SEQ ID NO: 1771 - RNA, 19 nt, synthetic construct
  source 1..19: mol_type = other RNA
  misc_difference 1: note = 2'-O-methyl modified nucleotide with phosphorothioate linkage may be 5' phosphate modified
  modified_base 2: mod_base = OTHER; note = 2'-fluoro modified nucleotide with phosphorothioate linkage
  modified_base 3: mod_base = OTHER; note = 2'-O-methyl modified nucleotide
  modified_base 4: mod_base = OTHER; note = 2'-fluoro modified nucleotide
  modified_base 5: mod_base = OTHER; note = 2'-O-methyl modified nucleotide
  modified_base 6: mod_base = OTHER; note = 2'-fluoro modified nucleotide
  modified_base 7: mod_base = OTHER; note = 2'-O-methyl modified nucleotide
  modified_base 8: mod_base = OTHER; note = 2'-fluoro modified nucleotide
  modified_base 9: mod_base = OTHER; note = 2'-O-methyl modified nucleotide
  modified_base 10: mod_base = OTHER; note = 2'-fluoro modified nucleotide
  modified_base 11: mod_base = OTHER; note = 2'-O-methyl modified nucleotide
  modified_base 12: mod_base = OTHER; note = 2'-fluoro modified nucleotide
  modified_base 13: mod_base = OTHER; note = 2'-O-methyl modified nucleotide
  modified_base 14: mod_base = OTHER; note = 2'-fluoro modified nucleotide with phosphorothioate linkage
  modified_base 15: mod_base = OTHER; note = 2'-O-methyl modified nucleotide with phosphorothioate linkage
  modified_base 16: mod_base = OTHER; note = 2'-fluoro modified nucleotide with phosphorothioate linkage
  modified_base 17: mod_base = OTHER; note = 2'-O-methyl modified nucleotide with phosphorothioate linkage
  modified_base 18: mod_base = OTHER; note = 2'-fluoro modified nucleotide with phosphorothioate linkage
  misc_difference 19: note = 2'-O-methyl modified nucleotide may be trivalent N-acetylgalactosamine modified
nacagtttggcctggagaa

SEQ ID NO: 1772 - RNA, 19 nt, synthetic construct
  source 1..19: mol_type = other RNA
  misc_difference 1: note = 2'-O-methyl modified nucleotide with phosphorothioate linkage may be 5' phosphate modified
  modified_base 2: mod_base = OTHER; note = 2'-fluoro modified nucleotide with phosphorothioate linkage
  modified_base 3: mod_base = OTHER; note = 2'-O-methyl modified nucleotide
  modified_base 4: mod_base = OTHER; note = 2'-fluoro modified nucleotide
  modified_base 5: mod_base = OTHER; note = 2'-O-methyl modified nucleotide
  modified_base 6: mod_base = OTHER; note = 2'-fluoro modified nucleotide
  modified_base 7: mod_base = OTHER; note = 2'-O-methyl modified nucleotide
  modified_base 8: mod_base = OTHER; note = 2'-fluoro modified nucleotide
  modified_base 9: mod_base = OTHER; note = 2'-O-methyl modified nucleotide
  modified_base 10: mod_base = OTHER; note = 2'-fluoro modified nucleotide
  modified_base 11: mod_base = OTHER; note = 2'-O-methyl modified nucleotide
  modified_base 12: mod_base = OTHER; note = 2'-fluoro modified nucleotide
  modified_base 13: mod_base = OTHER; note = 2'-O-methyl modified nucleotide
  modified_base 14: mod_base = OTHER; note = 2'-fluoro modified nucleotide with phosphorothioate linkage
  modified_base 15: mod_base = OTHER; note = 2'-O-methyl modified nucleotide with phosphorothioate linkage
  modified_base 16: mod_base = OTHER; note = 2'-fluoro modified nucleotide with phosphorothioate linkage
  modified_base 17: mod_base = OTHER; note = 2'-O-methyl modified nucleotide with phosphorothioate linkage
  modified_base 18: mod_base = OTHER; note = 2'-fluoro modified nucleotide with phosphorothioate linkage
  misc_difference 19: note = 2'-O-methyl modified nucleotide may be trivalent N-acetylgalactosamine modified
nattatagtgagttatttt

SEQ ID NO: 1773 - RNA, 19 nt, synthetic construct
  source 1..19: mol_type = other RNA
  misc_difference 1: note = 2'-O-methyl modified nucleotide with phosphorothioate linkage may be 5' phosphate modified
  modified_base 2: mod_base = OTHER; note = 2'-fluoro modified nucleotide with phosphorothioate linkage
  modified_base 3: mod_base = OTHER; note = 2'-O-methyl modified nucleotide
  modified_base 4: mod_base = OTHER; note = 2'-fluoro modified nucleotide
  modified_base 5: mod_base = OTHER; note = 2'-O-methyl modified nucleotide
  modified_base 6: mod_base = OTHER; note = 2'-fluoro modified nucleotide
  modified_base 7: mod_base = OTHER; note = 2'-O-methyl modified nucleotide
  modified_base 8: mod_base = OTHER; note = 2'-fluoro modified nucleotide
  modified_base 9: mod_base = OTHER; note = 2'-O-methyl modified nucleotide
  modified_base 10: mod_base = OTHER; note = 2'-fluoro modified nucleotide
  modified_base 11: mod_base = OTHER; note = 2'-O-methyl modified nucleotide
  modified_base 12: mod_base = OTHER; note = 2'-fluoro modified nucleotide
  modified_base 13: mod_base = OTHER; note = 2'-O-methyl modified nucleotide
  modified_base 14: mod_base = OTHER; note = 2'-fluoro modified nucleotide with phosphorothioate linkage
  modified_base 15: mod_base = OTHER; note = 2'-O-methyl modified nucleotide with phosphorothioate linkage
  modified_base 16: mod_base = OTHER; note = 2'-fluoro modified nucleotide with phosphorothioate linkage
  modified_base 17: mod_base = OTHER; note = 2'-O-methyl modified nucleotide with phosphorothioate linkage
  modified_base 18: mod_base = OTHER; note = 2'-fluoro modified nucleotide with phosphorothioate linkage
  misc_difference 19: note = 2'-O-methyl modified nucleotide may be trivalent N-acetylgalactosamine modified
nccaagtcagatgtctctt

SEQ ID NO: 1774 - RNA, 19 nt, synthetic construct
  source 1..19: mol_type = other RNA
  misc_difference 1: note = 2'-O-methyl modified nucleotide with phosphorothioate linkage may be 5' phosphate modified
  modified_base 2: mod_base = OTHER; note = 2'-fluoro modified nucleotide with phosphorothioate linkage
  modified_base 3: mod_base = OTHER; note = 2'-O-methyl modified nucleotide
  modified_base 4: mod_base = OTHER; note = 2'-fluoro modified nucleotide
  modified_base 5: mod_base = OTHER; note = 2'-O-methyl modified nucleotide
  modified_base 6: mod_base = OTHER; note = 2'-fluoro modified nucleotide
  modified_base 7: mod_base = OTHER; note = 2'-O-methyl modified nucleotide
  modified_base 8: mod_base = OTHER; note = 2'-fluoro modified nucleotide
  modified_base 9: mod_base = OTHER; note = 2'-O-methyl modified nucleotide
  modified_base 10: mod_base = OTHER; note = 2'-fluoro modified nucleotide
  modified_base 11: mod_base = OTHER; note = 2'-O-methyl modified nucleotide
  modified_base 12: mod_base = OTHER; note = 2'-fluoro modified nucleotide
  modified_base 13: mod_base = OTHER; note = 2'-O-methyl modified nucleotide
  modified_base 14: mod_base = OTHER; note = 2'-fluoro modified nucleotide with phosphorothioate linkage
  modified_base 15: mod_base = OTHER; note = 2'-O-methyl modified nucleotide with phosphorothioate linkage
  modified_base 16: mod_base = OTHER; note = 2'-fluoro modified nucleotide with phosphorothioate linkage
  modified_base 17: mod_base = OTHER; note = 2'-O-methyl modified nucleotide with phosphorothioate linkage
  modified_base 18: mod_base = OTHER; note = 2'-fluoro modified nucleotide with phosphorothioate linkage
  misc_difference 19: note = 2'-O-methyl modified nucleotide may be trivalent N-acetylgalactosamine modified
ncaggaaaagagataattc

SEQ ID NO: 1775 - RNA, 19 nt, synthetic construct
  source 1..19: mol_type = other RNA
  misc_difference 1: note = 2'-O-methyl modified nucleotide with phosphorothioate linkage may be 5' phosphate modified
  modified_base 2: mod_base = OTHER; note = 2'-fluoro modified nucleotide with phosphorothioate linkage
  modified_base 3: mod_base = OTHER; note = 2'-O-methyl modified nucleotide
  modified_base 4: mod_base = OTHER; note = 2'-fluoro modified nucleotide
  modified_base 5: mod_base = OTHER; note = 2'-O-methyl modified nucleotide
  modified_base 6: mod_base = OTHER; note = 2'-fluoro modified nucleotide
  modified_base 7: mod_base = OTHER; note = 2'-O-methyl modified nucleotide
  modified_base 8: mod_base = OTHER; note = 2'-fluoro modified nucleotide
  modified_base 9: mod_base = OTHER; note = 2'-O-methyl modified nucleotide
  modified_base 10: mod_base = OTHER; note = 2'-fluoro modified nucleotide
  modified_base 11: mod_base = OTHER; note = 2'-O-methyl modified nucleotide
  modified_base 12: mod_base = OTHER; note = 2'-fluoro modified nucleotide
  modified_base 13: mod_base = OTHER; note = 2'-O-methyl modified nucleotide
  modified_base 14: mod_base = OTHER; note = 2'-fluoro modified nucleotide with phosphorothioate linkage
  modified_base 15: mod_base = OTHER; note = 2'-O-methyl modified nucleotide with phosphorothioate linkage
  modified_base 16: mod_base = OTHER; note = 2'-fluoro modified nucleotide with phosphorothioate linkage
  modified_base 17: mod_base = OTHER; note = 2'-O-methyl modified nucleotide with phosphorothioate linkage
  modified_base 18: mod_base = OTHER; note = 2'-fluoro modified nucleotide with phosphorothioate linkage
  misc_difference 19: note = 2'-O-methyl modified nucleotide may be trivalent N-acetylgalactosamine modified
ngcaagacatattctttaa

SEQ ID NO: 1776 - RNA, 19 nt, synthetic construct
  source 1..19: mol_type = other RNA
  misc_difference 1: note = 2'-O-methyl modified nucleotide with phosphorothioate linkage may be 5' phosphate modified
  modified_base 2: mod_base = OTHER; note = 2'-fluoro modified nucleotide with phosphorothioate linkage
  modified_base 3: mod_base = OTHER; note = 2'-O-methyl modified nucleotide
  modified_base 4: mod_base = OTHER; note = 2'-fluoro modified nucleotide
  modified_base 5: mod_base = OTHER; note = 2'-O-methyl modified nucleotide
  modified_base 6: mod_base = OTHER; note = 2'-fluoro modified nucleotide
  modified_base 7: mod_base = OTHER; note = 2'-O-methyl modified nucleotide
  modified_base 8: mod_base = OTHER; note = 2'-fluoro modified nucleotide
  modified_base 9: mod_base = OTHER; note = 2'-O-methyl modified nucleotide
  modified_base 10: mod_base = OTHER; note = 2'-fluoro modified nucleotide
  modified_base 11: mod_base = OTHER; note = 2'-O-methyl modified nucleotide
  modified_base 12: mod_base = OTHER; note = 2'-fluoro modified nucleotide
  modified_base 13: mod_base = OTHER; note = 2'-O-methyl modified nucleotide
  modified_base 14: mod_base = OTHER; note = 2'-fluoro modified nucleotide with phosphorothioate linkage
  modified_base 15: mod_base = OTHER; note = 2'-O-methyl modified nucleotide with phosphorothioate linkage
  modified_base 16: mod_base = OTHER; note = 2'-fluoro modified nucleotide with phosphorothioate linkage
  modified_base 17: mod_base = OTHER; note = 2'-O-methyl modified nucleotide with phosphorothioate linkage
  modified_base 18: mod_base = OTHER; note = 2'-fluoro modified nucleotide with phosphorothioate linkage
  misc_difference 19: note = 2'-O-methyl modified nucleotide may be trivalent N-acetylgalactosamine modified
naaggccaatttccagagg

SEQ ID NO: 1777 - RNA, 19 nt, synthetic construct
  source 1..19: mol_type = other RNA
  misc_difference 1: note = 2'-O-methyl modified nucleotide with phosphorothioate linkage may be 5' phosphate modified
  modified_base 2: mod_base = OTHER; note = 2'-fluoro modified nucleotide with phosphorothioate linkage
  modified_base 3: mod_base = OTHER; note = 2'-O-methyl modified nucleotide
  modified_base 4: mod_base = OTHER; note = 2'-fluoro modified nucleotide
  modified_base 5: mod_base = OTHER; note = 2'-O-methyl modified nucleotide
  modified_base 6: mod_base = OTHER; note = 2'-fluoro modified nucleotide
  modified_base 7: mod_base = OTHER; note = 2'-O-methyl modified nucleotide
  modified_base 8: mod_base = OTHER; note = 2'-fluoro modified nucleotide
  modified_base 9: mod_base = OTHER; note = 2'-O-methyl modified nucleotide
  modified_base 10: mod_base = OTHER; note = 2'-fluoro modified nucleotide
  modified_base 11: mod_base = OTHER; note = 2'-O-methyl modified nucleotide
  modified_base 12: mod_base = OTHER; note = 2'-fluoro modified nucleotide
  modified_base 13: mod_base = OTHER; note = 2'-O-methyl modified nucleotide
  modified_base 14: mod_base = OTHER; note = 2'-fluoro modified nucleotide with phosphorothioate linkage
  modified_base 15: mod_base = OTHER; note = 2'-O-methyl modified nucleotide with phosphorothioate linkage
  modified_base 16: mod_base = OTHER; note = 2'-fluoro modified nucleotide with phosphorothioate linkage
  modified_base 17: mod_base = OTHER; note = 2'-O-methyl modified nucleotide with phosphorothioate linkage
  modified_base 18: mod_base = OTHER; note = 2'-fluoro modified nucleotide with phosphorothioate linkage
  misc_difference 19: note = 2'-O-methyl modified nucleotide may be trivalent N-acetylgalactosamine modified
naagtaattatagtgagtt

SEQ ID NO: 1778 - RNA, 19 nt, synthetic construct
  source 1..19: mol_type = other RNA
  misc_difference 1: note = 2'-O-methyl modified nucleotide with phosphorothioate linkage may be 5' phosphate modified
  modified_base 2: mod_base = OTHER; note = 2'-fluoro modified nucleotide with phosphorothioate linkage
  modified_base 3: mod_base = OTHER; note = 2'-O-methyl modified nucleotide
  modified_base 4: mod_base = OTHER; note = 2'-fluoro modified nucleotide
  modified_base 5: mod_base = OTHER; note = 2'-O-methyl modified nucleotide
  modified_base 6: mod_base = OTHER; note = 2'-fluoro modified nucleotide
  modified_base 7: mod_base = OTHER; note = 2'-O-methyl modified nucleotide
  modified_base 8: mod_base = OTHER; note = 2'-fluoro modified nucleotide
  modified_base 9: mod_base = OTHER; note = 2'-O-methyl modified nucleotide
  modified_base 10: mod_base = OTHER; note = 2'-fluoro modified nucleotide
  modified_base 11: mod_base = OTHER; note = 2'-O-methyl modified nucleotide
  modified_base 12: mod_base = OTHER; note = 2'-fluoro modified nucleotide
  modified_base 13: mod_base = OTHER; note = 2'-O-methyl modified nucleotide
  modified_base 14: mod_base = OTHER; note = 2'-fluoro modified nucleotide with phosphorothioate linkage
  modified_base 15: mod_base = OTHER; note = 2'-O-methyl modified nucleotide with phosphorothioate linkage
  modified_base 16: mod_base = OTHER; note = 2'-fluoro modified nucleotide with phosphorothioate linkage
  modified_base 17: mod_base = OTHER; note = 2'-O-methyl modified nucleotide with phosphorothioate linkage
  modified_base 18: mod_base = OTHER; note = 2'-fluoro modified nucleotide with phosphorothioate linkage
  misc_difference 19: note = 2'-O-methyl modified nucleotide may be trivalent N-acetylgalactosamine modified
ntaaaatcaagtaattata

SEQ ID NO: 1779 - RNA, 19 nt, synthetic construct
  source 1..19: mol_type = other RNA
  misc_difference 1: note = 2'-O-methyl modified nucleotide with phosphorothioate linkage may be 5' phosphate modified
  modified_base 2: mod_base = OTHER; note = 2'-fluoro modified nucleotide with phosphorothioate linkage
  modified_base 3: mod_base = OTHER; note = 2'-O-methyl modified nucleotide
  modified_base 4: mod_base = OTHER; note = 2'-fluoro modified nucleotide
  modified_base 5: mod_base = OTHER; note = 2'-O-methyl modified nucleotide
  modified_base 6: mod_base = OTHER; note = 2'-fluoro modified nucleotide
  modified_base 7: mod_base = OTHER; note = 2'-O-methyl modified nucleotide
  modified_base 8: mod_base = OTHER; note = 2'-fluoro modified nucleotide
  modified_base 9: mod_base = OTHER; note = 2'-O-methyl modified nucleotide
  modified_base 10: mod_base = OTHER; note = 2'-fluoro modified nucleotide
  modified_base 11: mod_base = OTHER; note = 2'-O-methyl modified nucleotide
  modified_base 12: mod_base = OTHER; note = 2'-fluoro modified nucleotide
  modified_base 13: mod_base = OTHER; note = 2'-O-methyl modified nucleotide
  modified_base 14: mod_base = OTHER; note = 2'-fluoro modified nucleotide with phosphorothioate linkage
  modified_base 15: mod_base = OTHER; note = 2'-O-methyl modified nucleotide with phosphorothioate linkage
  modified_base 16: mod_base = OTHER; note = 2'-fluoro modified nucleotide with phosphorothioate linkage
  modified_base 17: mod_base = OTHER; note = 2'-O-methyl modified nucleotide with phosphorothioate linkage
  modified_base 18: mod_base = OTHER; note = 2'-fluoro modified nucleotide with phosphorothioate linkage
  misc_difference 19: note = 2'-O-methyl modified nucleotide may be trivalent N-acetylgalactosamine modified
ntcaagtaattatagtgag

SEQ ID NO: 1780 - RNA, 19 nt, synthetic construct
  source 1..19: mol_type = other RNA
  misc_difference 1: note = 2'-O-methyl modified nucleotide with phosphorothioate linkage may be 5' phosphate modified
  modified_base 2: mod_base = OTHER; note = 2'-fluoro modified nucleotide with phosphorothioate linkage
  modified_base 3: mod_base = OTHER; note = 2'-O-methyl modified nucleotide
  modified_base 4: mod_base = OTHER; note = 2'-fluoro modified nucleotide
  modified_base 5: mod_base = OTHER; note = 2'-O-methyl modified nucleotide
  modified_base 6: mod_base = OTHER; note = 2'-fluoro modified nucleotide
  modified_base 7: mod_base = OTHER; note = 2'-O-methyl modified nucleotide
  modified_base 8: mod_base = OTHER; note = 2'-fluoro modified nucleotide
  modified_base 9: mod_base = OTHER; note = 2'-O-methyl modified nucleotide
  modified_base 10: mod_base = OTHER; note = 2'-fluoro modified nucleotide
  modified_base 11: mod_base = OTHER; note = 2'-O-methyl modified nucleotide
  modified_base 12: mod_base = OTHER; note = 2'-fluoro modified nucleotide
  modified_base 13: mod_base = OTHER; note = 2'-O-methyl modified nucleotide
  modified_base 14: mod_base = OTHER; note = 2'-fluoro modified nucleotide with phosphorothioate linkage
  modified_base 15: mod_base = OTHER; note = 2'-O-methyl modified nucleotide with phosphorothioate linkage
  modified_base 16: mod_base = OTHER; note = 2'-fluoro modified nucleotide with phosphorothioate linkage
  modified_base 17: mod_base = OTHER; note = 2'-O-methyl modified nucleotide with phosphorothioate linkage
  modified_base 18: mod_base = OTHER; note = 2'-fluoro modified nucleotide with phosphorothioate linkage
  misc_difference 19: note = 2'-O-methyl modified nucleotide may be trivalent N-acetylgalactosamine modified
nccaatttccagaggaagc

SEQ ID NO: 1781 - RNA, 19 nt, synthetic construct
  source 1..19: mol_type = other RNA
  misc_difference 1: note = 2'-O-methyl modified nucleotide with phosphorothioate linkage may be 5' phosphate modified
  modified_base 2: mod_base = OTHER; note = 2'-fluoro modified nucleotide with phosphorothioate linkage
  modified_base 3: mod_base = OTHER; note = 2'-O-methyl modified nucleotide
  modified_base 4: mod_base = OTHER; note = 2'-fluoro modified nucleotide
  modified_base 5: mod_base = OTHER; note = 2'-O-methyl modified nucleotide
  modified_base 6: mod_base = OTHER; note = 2'-fluoro modified nucleotide
  modified_base 7: mod_base = OTHER; note = 2'-O-methyl modified nucleotide
  modified_base 8: mod_base = OTHER; note = 2'-fluoro modified nucleotide
  modified_base 9: mod_base = OTHER; note = 2'-O-methyl modified nucleotide
  modified_base 10: mod_base = OTHER; note = 2'-fluoro modified nucleotide
  modified_base 11: mod_base = OTHER; note = 2'-O-methyl modified nucleotide
  modified_base 12: mod_base = OTHER; note = 2'-fluoro modified nucleotide
  modified_base 13: mod_base = OTHER; note = 2'-O-methyl modified nucleotide
  modified_base 14: mod_base = OTHER; note = 2'-fluoro modified nucleotide with phosphorothioate linkage
  modified_base 15: mod_base = OTHER; note = 2'-O-methyl modified nucleotide with phosphorothioate linkage
  modified_base 16: mod_base = OTHER; note = 2'-fluoro modified nucleotide with phosphorothioate linkage
  modified_base 17: mod_base = OTHER; note = 2'-O-methyl modified nucleotide with phosphorothioate linkage
  modified_base 18: mod_base = OTHER; note = 2'-fluoro modified nucleotide with phosphorothioate linkage
  misc_difference 19: note = 2'-O-methyl modified nucleotide may be trivalent N-acetylgalactosamine modified
ngtaattatagtgagttat

SEQ ID NO: 1782 - RNA, 19 nt, synthetic construct
  source 1..19: mol_type = other RNA
  misc_difference 1: note = 2'-O-methyl modified nucleotide with phosphorothioate linkage may be 5' phosphate modified
  modified_base 2: mod_base = OTHER; note = 2'-fluoro modified nucleotide with phosphorothioate linkage
  modified_base 3: mod_base = OTHER; note = 2'-O-methyl modified nucleotide
  modified_base 4: mod_base = OTHER; note = 2'-fluoro modified nucleotide
  modified_base 5: mod_base = OTHER; note = 2'-O-methyl modified nucleotide
  modified_base 6: mod_base = OTHER; note = 2'-fluoro modified nucleotide
  modified_base 7: mod_base = OTHER; note = 2'-O-methyl modified nucleotide
  modified_base 8: mod_base = OTHER; note = 2'-fluoro modified nucleotide
  modified_base 9: mod_base = OTHER; note = 2'-O-methyl modified nucleotide
  modified_base 10: mod_base = OTHER; note = 2'-fluoro modified nucleotide
  modified_base 11: mod_base = OTHER; note = 2'-O-methyl modified nucleotide
  modified_base 12: mod_base = OTHER; note = 2'-fluoro modified nucleotide
  modified_base 13: mod_base = OTHER; note = 2'-O-methyl modified nucleotide
  modified_base 14: mod_base = OTHER; note = 2'-fluoro modified nucleotide with phosphorothioate linkage
  modified_base 15: mod_base = OTHER; note = 2'-O-methyl modified nucleotide with phosphorothioate linkage
  modified_base 16: mod_base = OTHER; note = 2'-fluoro modified nucleotide with phosphorothioate linkage
  modified_base 17: mod_base = OTHER; note = 2'-O-methyl modified nucleotide with phosphorothioate linkage
  modified_base 18: mod_base = OTHER; note = 2'-fluoro modified nucleotide with phosphorothioate linkage
  misc_difference 19: note = 2'-O-methyl modified nucleotide may be trivalent N-acetylgalactosamine modified
naaaggtacttgttgttta

SEQ ID NO: 1783 - RNA, 19 nt, synthetic construct
  source 1..19: mol_type = other RNA
  misc_difference 1: note = 2'-O-methyl modified nucleotide with phosphorothioate linkage may be 5' phosphate modified
  modified_base 2: mod_base = OTHER; note = 2'-fluoro modified nucleotide with phosphorothioate linkage
  modified_base 3: mod_base = OTHER; note = 2'-O-methyl modified nucleotide
  modified_base 4: mod_base = OTHER; note = 2'-fluoro modified nucleotide
  modified_base 5: mod_base = OTHER; note = 2'-O-methyl modified nucleotide
  modified_base 6: mod_base = OTHER; note = 2'-fluoro modified nucleotide
  modified_base 7: mod_base = OTHER; note = 2'-O-methyl modified nucleotide
  modified_base 8: mod_base = OTHER; note = 2'-fluoro modified nucleotide
  modified_base 9: mod_base = OTHER; note = 2'-O-methyl modified nucleotide
  modified_base 10: mod_base = OTHER; note = 2'-fluoro modified nucleotide
  modified_base 11: mod_base = OTHER; note = 2'-O-methyl modified nucleotide
  modified_base 12: mod_base = OTHER; note = 2'-fluoro modified nucleotide
  modified_base 13: mod_base = OTHER; note = 2'-O-methyl modified nucleotide
  modified_base 14: mod_base = OTHER; note = 2'-fluoro modified nucleotide with phosphorothioate linkage
  modified_base 15: mod_base = OTHER; note = 2'-O-methyl modified nucleotide with phosphorothioate linkage
  modified_base 16: mod_base = OTHER; note = 2'-fluoro modified nucleotide with phosphorothioate linkage
  modified_base 17: mod_base = OTHER; note = 2'-O-methyl modified nucleotide with phosphorothioate linkage
  modified_base 18: mod_base = OTHER; note = 2'-fluoro modified nucleotide with phosphorothioate linkage
  misc_difference 19: note = 2'-O-methyl modified nucleotide may be trivalent N-acetylgalactosamine modified
nactgctgtttcagaatca

SEQ ID NO: 1784 - RNA, 19 nt, synthetic construct
  source 1..19: mol_type = other RNA
  misc_difference 1: note = 2'-O-methyl modified nucleotide with phosphorothioate linkage may be 5' phosphate modified
  modified_base 2: mod_base = OTHER; note = 2'-fluoro modified nucleotide with phosphorothioate linkage
  modified_base 3: mod_base = OTHER; note = 2'-O-methyl modified nucleotide
  modified_base 4: mod_base = OTHER; note = 2'-fluoro modified nucleotide
  modified_base 5: mod_base = OTHER; note = 2'-O-methyl modified nucleotide
  modified_base 6: mod_base = OTHER; note = 2'-fluoro modified nucleotide
  modified_base 7: mod_base = OTHER; note = 2'-O-methyl modified nucleotide
  modified_base 8: mod_base = OTHER; note = 2'-fluoro modified nucleotide
  modified_base 9: mod_base = OTHER; note = 2'-O-methyl modified nucleotide
  modified_base 10: mod_base = OTHER; note = 2'-fluoro modified nucleotide
  modified_base 11: mod_base = OTHER; note = 2'-O-methyl modified nucleotide
  modified_base 12: mod_base = OTHER; note = 2'-fluoro modified nucleotide
  modified_base 13: mod_base = OTHER; note = 2'-O-methyl modified nucleotide
  modified_base 14: mod_base = OTHER; note = 2'-fluoro modified nucleotide with phosphorothioate linkage
  modified_base 15: mod_base = OTHER; note = 2'-O-methyl modified nucleotide with phosphorothioate linkage
  modified_base 16: mod_base = OTHER; note = 2'-fluoro modified nucleotide with phosphorothioate linkage
  modified_base 17: mod_base = OTHER; note = 2'-O-methyl modified nucleotide with phosphorothioate linkage
  modified_base 18: mod_base = OTHER; note = 2'-fluoro modified nucleotide with phosphorothioate linkage
  misc_difference 19: note = 2'-O-methyl modified nucleotide may be trivalent N-acetylgalactosamine modified
nctgctgtttcagaatcaa

SEQ ID NO: 1785 - RNA, 19 nt, synthetic construct
  source 1..19: mol_type = other RNA
  misc_difference 1: note = 2'-O-methyl modified nucleotide with phosphorothioate linkage may be 5' phosphate modified
  modified_base 2: mod_base = OTHER; note = 2'-fluoro modified nucleotide with phosphorothioate linkage
  modified_base 3: mod_base = OTHER; note = 2'-O-methyl modified nucleotide
  modified_base 4: mod_base = OTHER; note = 2'-fluoro modified nucleotide
  modified_base 5: mod_base = OTHER; note = 2'-O-methyl modified nucleotide
  modified_base 6: mod_base = OTHER; note = 2'-fluoro modified nucleotide
  modified_base 7: mod_base = OTHER; note = 2'-O-methyl modified nucleotide
  modified_base 8: mod_base = OTHER; note = 2'-fluoro modified nucleotide
  modified_base 9: mod_base = OTHER; note = 2'-O-methyl modified nucleotide
  modified_base 10: mod_base = OTHER; note = 2'-fluoro modified nucleotide
  modified_base 11: mod_base = OTHER; note = 2'-O-methyl modified nucleotide
  modified_base 12: mod_base = OTHER; note = 2'-fluoro modified nucleotide
  modified_base 13: mod_base = OTHER; note = 2'-O-methyl modified nucleotide
  modified_base 14: mod_base = OTHER; note = 2'-fluoro modified nucleotide with phosphorothioate linkage
  modified_base 15: mod_base = OTHER; note = 2'-O-methyl modified nucleotide with phosphorothioate linkage
  modified_base 16: mod_base = OTHER; note = 2'-fluoro modified nucleotide with phosphorothioate linkage
  modified_base 17: mod_base = OTHER; note = 2'-O-methyl modified nucleotide with phosphorothioate linkage
  modified_base 18: mod_base = OTHER; note = 2'-fluoro modified nucleotide with phosphorothioate linkage
  misc_difference 19: note = 2'-O-methyl modified nucleotide may be trivalent N-acetylgalactosamine modified
ntataaaggtacttgttgt

SEQ ID NO: 1786 - RNA, 19 nt, synthetic construct
  source 1..19: mol_type = other RNA
  misc_difference 1: note = 2'-O-methyl modified nucleotide with phosphorothioate linkage may be 5' phosphate modified
  modified_base 2: mod_base = OTHER; note = 2'-fluoro modified nucleotide with phosphorothioate linkage
  modified_base 3: mod_base = OTHER; note = 2'-O-methyl modified nucleotide
  modified_base 4: mod_base = OTHER; note = 2'-fluoro modified nucleotide
  modified_base 5: mod_base = OTHER; note = 2'-O-methyl modified nucleotide
  modified_base 6: mod_base = OTHER; note = 2'-fluoro modified nucleotide
  modified_base 7: mod_base = OTHER; note = 2'-O-methyl modified nucleotide
  modified_base 8: mod_base = OTHER; note = 2'-fluoro modified nucleotide
  modified_base 9: mod_base = OTHER; note = 2'-O-methyl modified nucleotide
  modified_base 10: mod_base = OTHER; note = 2'-fluoro modified nucleotide
  modified_base 11: mod_base = OTHER; note = 2'-O-methyl modified nucleotide
  modified_base 12: mod_base = OTHER; note = 2'-fluoro modified nucleotide
  modified_base 13: mod_base = OTHER; note = 2'-O-methyl modified nucleotide
  modified_base 14: mod_base = OTHER; note = 2'-fluoro modified nucleotide with phosphorothioate linkage
  modified_base 15: mod_base = OTHER; note = 2'-O-methyl modified nucleotide with phosphorothioate linkage
  modified_base 16: mod_base = OTHER; note = 2'-fluoro modified nucleotide with phosphorothioate linkage
  modified_base 17: mod_base = OTHER; note = 2'-O-methyl modified nucleotide with phosphorothioate linkage
  modified_base 18: mod_base = OTHER; note = 2'-fluoro modified nucleotide with phosphorothioate linkage
  misc_difference 19: note = 2'-O-methyl modified nucleotide may be trivalent N-acetylgalactosamine modified
ngtaaacagttcctttcaa

SEQ ID NO: 1787 - RNA, 19 nt, synthetic construct
  source 1..19: mol_type = other RNA
  misc_difference 1: note = 2'-O-methyl modified nucleotide with phosphorothioate linkage may be 5' phosphate modified
  modified_base 2: mod_base = OTHER; note = 2'-fluoro modified nucleotide with phosphorothioate linkage
  modified_base 3: mod_base = OTHER; note = 2'-O-methyl modified nucleotide
  modified_base 4: mod_base = OTHER; note = 2'-fluoro modified nucleotide
  modified_base 5: mod_base = OTHER; note = 2'-O-methyl modified nucleotide
  modified_base 6: mod_base = OTHER; note = 2'-fluoro modified nucleotide
  modified_base 7: mod_base = OTHER; note = 2'-O-methyl modified nucleotide
  modified_base 8: mod_base = OTHER; note = 2'-fluoro modified nucleotide
  modified_base 9: mod_base = OTHER; note = 2'-O-methyl modified nucleotide
  modified_base 10: mod_base = OTHER; note = 2'-fluoro modified nucleotide
  modified_base 11: mod_base = OTHER; note = 2'-O-methyl modified nucleotide
  modified_base 12: mod_base = OTHER; note = 2'-fluoro modified nucleotide
  modified_base 13: mod_base = OTHER; note = 2'-O-methyl modified nucleotide
  modified_base 14: mod_base = OTHER; note = 2'-fluoro modified nucleotide with phosphorothioate linkage
  modified_base 15: mod_base = OTHER; note = 2'-O-methyl modified nucleotide with phosphorothioate linkage
  modified_base 16: mod_base = OTHER; note = 2'-fluoro modified nucleotide with phosphorothioate linkage
  modified_base 17: mod_base = OTHER; note = 2'-O-methyl modified nucleotide with phosphorothioate linkage
  modified_base 18: mod_base = OTHER; note = 2'-fluoro modified nucleotide with phosphorothioate linkage
  misc_difference 19: note = 2'-O-methyl modified nucleotide may be trivalent N-acetylgalactosamine modified
ngtaactttggctgagaga

SEQ ID NO: 1788 - RNA, 19 nt, synthetic construct
  source 1..19: mol_type = other RNA
  misc_difference 1: note = 2'-O-methyl modified nucleotide with phosphorothioate linkage may be 5' phosphate modified
  modified_base 2: mod_base = OTHER; note = 2'-fluoro modified nucleotide with phosphorothioate linkage
  modified_base 3: mod_base = OTHER; note = 2'-O-methyl modified nucleotide
  modified_base 4: mod_base = OTHER; note = 2'-fluoro modified nucleotide
  modified_base 5: mod_base = OTHER; note = 2'-O-methyl modified nucleotide
  modified_base 6: mod_base = OTHER; note = 2'-fluoro modified nucleotide
  modified_base 7: mod_base = OTHER; note = 2'-O-methyl modified nucleotide
  modified_base 8: mod_base = OTHER; note = 2'-fluoro modified nucleotide
  modified_base 9: mod_base = OTHER; note = 2'-O-methyl modified nucleotide
  modified_base 10: mod_base = OTHER; note = 2'-fluoro modified nucleotide
  modified_base 11: mod_base = OTHER; note = 2'-O-methyl modified nucleotide
  modified_base 12: mod_base = OTHER; note = 2'-fluoro modified nucleotide
  modified_base 13: mod_base = OTHER; note = 2'-O-methyl modified nucleotide
  modified_base 14: mod_base = OTHER; note = 2'-fluoro modified nucleotide with phosphorothioate linkage
  modified_base 15: mod_base = OTHER; note = 2'-O-methyl modified nucleotide with phosphorothioate linkage
  modified_base 16: mod_base = OTHER; note = 2'-fluoro modified nucleotide with phosphorothioate linkage
  modified_base 17: mod_base = OTHER; note = 2'-O-methyl modified nucleotide with phosphorothioate linkage
  modified_base 18: mod_base = OTHER; note = 2'-fluoro modified nucleotide with phosphorothioate linkage
  misc_difference 19: note = 2'-O-methyl modified nucleotide may be trivalent N-acetylgalactosamine modified
natagttgtaaacagttcc

SEQ ID NO: 1789 - RNA, 19 nt, synthetic construct
  source 1..19: mol_type = other RNA
  misc_difference 1: note = 2'-O-methyl modified nucleotide with phosphorothioate linkage may be 5' phosphate modified
  modified_base 2: mod_base = OTHER; note = 2'-fluoro modified nucleotide with phosphorothioate linkage
  modified_base 3: mod_base = OTHER; note = 2'-O-methyl modified nucleotide
  modified_base 4: mod_base = OTHER; note = 2'-fluoro modified nucleotide
  modified_base 5: mod_base = OTHER; note = 2'-O-methyl modified nucleotide
  modified_base 6: mod_base = OTHER; note = 2'-fluoro modified nucleotide
  modified_base 7: mod_base = OTHER; note = 2'-O-methyl modified nucleotide
  modified_base 8: mod_base = OTHER; note = 2'-fluoro modified nucleotide
  modified_base 9: mod_base = OTHER; note = 2'-O-methyl modified nucleotide
  modified_base 10: mod_base = OTHER; note = 2'-fluoro modified nucleotide
  modified_base 11: mod_base = OTHER; note = 2'-O-methyl modified nucleotide
  modified_base 12: mod_base = OTHER; note = 2'-fluoro modified nucleotide
  modified_base 13: mod_base = OTHER; note = 2'-O-methyl modified nucleotide
  modified_base 14: mod_base = OTHER; note = 2'-fluoro modified nucleotide with phosphorothioate linkage
  modified_base 15: mod_base = OTHER; note = 2'-O-methyl modified nucleotide with phosphorothioate linkage
  modified_base 16: mod_base = OTHER; note = 2'-fluoro modified nucleotide with phosphorothioate linkage
  modified_base 17: mod_base = OTHER; note = 2'-O-methyl modified nucleotide with phosphorothioate linkage
  modified_base 18: mod_base = OTHER; note = 2'-fluoro modified nucleotide with phosphorothioate linkage
  misc_difference 19: note = 2'-O-methyl modified nucleotide may be trivalent N-acetylgalactosamine modified
ncatattctttaacttcaa

SEQ ID NO: 1790 - RNA, 19 nt, synthetic construct
  source 1..19: mol_type = other RNA
  misc_difference 1: note = 2'-O-methyl modified nucleotide with phosphorothioate linkage may be 5' phosphate modified
  modified_base 2: mod_base = OTHER; note = 2'-fluoro modified nucleotide with phosphorothioate linkage
  modified_base 3: mod_base = OTHER; note = 2'-O-methyl modified nucleotide
  modified_base 4: mod_base = OTHER; note = 2'-fluoro modified nucleotide
  modified_base 5: mod_base = OTHER; note = 2'-O-methyl modified nucleotide
  modified_base 6: mod_base = OTHER; note = 2'-fluoro modified nucleotide
  modified_base 7: mod_base = OTHER; note = 2'-O-methyl modified nucleotide
  modified_base 8: mod_base = OTHER; note = 2'-fluoro modified nucleotide
  modified_base 9: mod_base = OTHER; note = 2'-O-methyl modified nucleotide
  modified_base 10: mod_base = OTHER; note = 2'-fluoro modified nucleotide
  modified_base 11: mod_base = OTHER; note = 2'-O-methyl modified nucleotide
  modified_base 12: mod_base = OTHER; note = 2'-fluoro modified nucleotide
  modified_base 13: mod_base = OTHER; note = 2'-O-methyl modified nucleotide
  modified_base 14: mod_base = OTHER; note = 2'-fluoro modified nucleotide with phosphorothioate linkage
  modified_base 15: mod_base = OTHER; note = 2'-O-methyl modified nucleotide with phosphorothioate linkage
  modified_base 16: mod_base = OTHER; note = 2'-fluoro modified nucleotide with phosphorothioate linkage
  modified_base 17: mod_base = OTHER; note = 2'-O-methyl modified nucleotide with phosphorothioate linkage
  modified_base 18: mod_base = OTHER; note = 2'-fluoro modified nucleotide with phosphorothioate linkage
  misc_difference 19: note = 2'-O-methyl modified nucleotide may be trivalent N-acetylgalactosamine modified
nagcagtccttttacactc

SEQ ID NO: 1791 - RNA, 19 nt, synthetic construct
  source 1..19: mol_type = other RNA
  misc_difference 1: note = 2'-O-methyl modified nucleotide with phosphorothioate linkage may be 5' phosphate modified
  modified_base 2: mod_base = OTHER; note = 2'-fluoro modified nucleotide with phosphorothioate linkage
  modified_base 3: mod_base = OTHER; note = 2'-O-methyl modified nucleotide
  modified_base 4: mod_base = OTHER; note = 2'-fluoro modified nucleotide
  modified_base 5: mod_base = OTHER; note = 2'-O-methyl modified nucleotide
  modified_base 6: mod_base = OTHER; note = 2'-fluoro modified nucleotide
  modified_base 7: mod_base = OTHER; note = 2'-O-methyl modified nucleotide
  modified_base 8: mod_base = OTHER; note = 2'-fluoro modified nucleotide
  modified_base 9: mod_base = OTHER; note = 2'-O-methyl modified nucleotide
  modified_base 10: mod_base = OTHER; note = 2'-fluoro modified nucleotide
  modified_base 11: mod_base = OTHER; note = 2'-O-methyl modified nucleotide
  modified_base 12: mod_base = OTHER; note = 2'-fluoro modified nucleotide
  modified_base 13: mod_base = OTHER; note = 2'-O-methyl modified nucleotide
  modified_base 14: mod_base = OTHER; note = 2'-fluoro modified nucleotide with phosphorothioate linkage
  modified_base 15: mod_base = OTHER; note = 2'-O-methyl modified nucleotide with phosphorothioate linkage
  modified_base 16: mod_base = OTHER; note = 2'-fluoro modified nucleotide with phosphorothioate linkage
  modified_base 17: mod_base = OTHER; note = 2'-O-methyl modified nucleotide with phosphorothioate linkage
  modified_base 18: mod_base = OTHER; note = 2'-fluoro modified nucleotide with phosphorothioate linkage
  misc_difference 19: note = 2'-O-methyl modified nucleotide may be trivalent N-acetylgalactosamine modified
nagtgagttattttgtcaa

SEQ ID NO: 1792 - RNA, 19 nt, synthetic construct
  source 1..19: mol_type = other RNA
  misc_difference 1: note = 2'-O-methyl modified nucleotide with phosphorothioate linkage may be 5' phosphate modified
  modified_base 2: mod_base = OTHER; note = 2'-fluoro modified nucleotide with phosphorothioate linkage
  modified_base 3: mod_base = OTHER; note = 2'-O-methyl modified nucleotide
  modified_base 4: mod_base = OTHER; note = 2'-fluoro modified nucleotide
  modified_base 5: mod_base = OTHER; note = 2'-O-methyl modified nucleotide
  modified_base 6: mod_base = OTHER; note = 2'-fluoro modified nucleotide
  modified_base 7: mod_base = OTHER; note = 2'-O-methyl modified nucleotide
  modified_base 8: mod_base = OTHER; note = 2'-fluoro modified nucleotide
  modified_base 9: mod_base = OTHER; note = 2'-O-methyl modified nucleotide
  modified_base 10: mod_base = OTHER; note = 2'-fluoro modified nucleotide
  modified_base 11: mod_base = OTHER; note = 2'-O-methyl modified nucleotide
  modified_base 12: mod_base = OTHER; note = 2'-fluoro modified nucleotide
  modified_base 13: mod_base = OTHER; note = 2'-O-methyl modified nucleotide
  modified_base 14: mod_base = OTHER; note = 2'-fluoro modified nucleotide with phosphorothioate linkage
  modified_base 15: mod_base = OTHER; note = 2'-O-methyl modified nucleotide with phosphorothioate linkage
  modified_base 16: mod_base = OTHER; note = 2'-fluoro modified nucleotide with phosphorothioate linkage
  modified_base 17: mod_base = OTHER; note = 2'-O-methyl modified nucleotide with phosphorothioate linkage
  modified_base 18: mod_base = OTHER; note = 2'-fluoro modified nucleotide with phosphorothioate linkage
  misc_difference 19: note = 2'-O-methyl modified nucleotide may be trivalent N-acetylgalactosamine modified
nggaagacatctttgaaca

SEQ ID NO: 1793 - RNA, 19 nt, synthetic construct
  source 1..19: mol_type = other RNA
  misc_difference 1: note = 2'-O-methyl modified nucleotide with phosphorothioate linkage may be 5' phosphate modified
  modified_base 2: mod_base = OTHER; note = 2'-fluoro modified nucleotide with phosphorothioate linkage
  modified_base 3: mod_base = OTHER; note = 2'-O-methyl modified nucleotide
  modified_base 4: mod_base = OTHER; note = 2'-fluoro modified nucleotide
  modified_base 5: mod_base = OTHER; note = 2'-O-methyl modified nucleotide
  modified_base 6: mod_base = OTHER; note = 2'-fluoro modified nucleotide
  modified_base 7: mod_base = OTHER; note = 2'-O-methyl modified nucleotide
  modified_base 8: mod_base = OTHER; note = 2'-fluoro modified nucleotide
  modified_base 9: mod_base = OTHER; note = 2'-O-methyl modified nucleotide
  modified_base 10: mod_base = OTHER; note = 2'-fluoro modified nucleotide
  modified_base 11: mod_base = OTHER; note = 2'-O-methyl modified nucleotide
  modified_base 12: mod_base = OTHER; note = 2'-fluoro modified nucleotide
  modified_base 13: mod_base = OTHER; note = 2'-O-methyl modified nucleotide
  modified_base 14: mod_base = OTHER; note = 2'-fluoro modified nucleotide with phosphorothioate linkage
  modified_base 15: mod_base = OTHER; note = 2'-O-methyl modified nucleotide with phosphorothioate linkage
  modified_base 16: mod_base = OTHER; note = 2'-fluoro modified nucleotide with phosphorothioate linkage
  modified_base 17: mod_base = OTHER; note = 2'-O-methyl modified nucleotide with phosphorothioate linkage
  modified_base 18: mod_base = OTHER; note = 2'-fluoro modified nucleotide with phosphorothioate linkage
  misc_difference 19: note = 2'-O-methyl modified nucleotide may be trivalent N-acetylgalactosamine modified
ncagtccttttacactcaa

SEQ ID NO: 1794 - RNA, 19 nt, synthetic construct
  source 1..19: mol_type = other RNA
  misc_difference 1: note = 2'-O-methyl modified nucleotide with phosphorothioate linkage may be 5' phosphate modified
  modified_base 2: mod_base = OTHER; note = 2'-fluoro modified nucleotide with phosphorothioate linkage
  modified_base 3: mod_base = OTHER; note = 2'-O-methyl modified nucleotide
  modified_base 4: mod_base = OTHER; note = 2'-fluoro modified nucleotide
  modified_base 5: mod_base = OTHER; note = 2'-O-methyl modified nucleotide
  modified_base 6: mod_base = OTHER; note = 2'-fluoro modified nucleotide
  modified_base 7: mod_base = OTHER; note = 2'-O-methyl modified nucleotide
  modified_base 8: mod_base = OTHER; note = 2'-fluoro modified nucleotide
  modified_base 9: mod_base = OTHER; note = 2'-O-methyl modified nucleotide
  modified_base 10: mod_base = OTHER; note = 2'-fluoro modified nucleotide
  modified_base 11: mod_base = OTHER; note = 2'-O-methyl modified nucleotide
  modified_base 12: mod_base = OTHER; note = 2'-fluoro modified nucleotide
  modified_base 13: mod_base = OTHER; note = 2'-O-methyl modified nucleotide
  modified_base 14: mod_base = OTHER; note = 2'-fluoro modified nucleotide with phosphorothioate linkage
  modified_base 15: mod_base = OTHER; note = 2'-O-methyl modified nucleotide with phosphorothioate linkage
  modified_base 16: mod_base = OTHER; note = 2'-fluoro modified nucleotide with phosphorothioate linkage
  modified_base 17: mod_base = OTHER; note = 2'-O-methyl modified nucleotide with phosphorothioate linkage
  modified_base 18: mod_base = OTHER; note = 2'-fluoro modified nucleotide with phosphorothioate linkage
  misc_difference 19: note = 2'-O-methyl modified nucleotide may be trivalent N-acetylgalactosamine modified
ngttattttgtcaatatat

SEQ ID NO: 1795 - RNA, 19 nt, synthetic construct
  source 1..19: mol_type = other RNA
  misc_difference 1: note = 2'-O-methyl modified nucleotide with phosphorothioate linkage may be 5' phosphate modified
  modified_base 2: mod_base = OTHER; note = 2'-fluoro modified nucleotide with phosphorothioate linkage
  modified_base 3: mod_base = OTHER; note = 2'-O-methyl modified nucleotide
  modified_base 4: mod_base = OTHER; note = 2'-fluoro modified nucleotide
  modified_base 5: mod_base = OTHER; note = 2'-O-methyl modified nucleotide
  modified_base 6: mod_base = OTHER; note = 2'-fluoro modified nucleotide
  modified_base 7: mod_base = OTHER; note = 2'-O-methyl modified nucleotide
  modified_base 8: mod_base = OTHER; note = 2'-fluoro modified nucleotide
  modified_base 9: mod_base = OTHER; note = 2'-O-methyl modified nucleotide
  modified_base 10: mod_base = OTHER; note = 2'-fluoro modified nucleotide
  modified_base 11: mod_base = OTHER; note = 2'-O-methyl modified nucleotide
  modified_base 12: mod_base = OTHER; note = 2'-fluoro modified nucleotide
  modified_base 13: mod_base = OTHER; note = 2'-O-methyl modified nucleotide
  modified_base 14: mod_base = OTHER; note = 2'-fluoro modified nucleotide with phosphorothioate linkage
  modified_base 15: mod_base = OTHER; note = 2'-O-methyl modified nucleotide with phosphorothioate linkage
  modified_base 16: mod_base = OTHER; note = 2'-fluoro modified nucleotide with phosphorothioate linkage
  modified_base 17: mod_base = OTHER; note = 2'-O-methyl modified nucleotide with phosphorothioate linkage
  modified_base 18: mod_base = OTHER; note = 2'-fluoro modified nucleotide with phosphorothioate linkage
  misc_difference 19: note = 2'-O-methyl modified nucleotide may be trivalent N-acetylgalactosamine modified
ntacaacagaatatggtat

SEQ ID NO: 1796 - RNA, 19 nt, synthetic construct
  source 1..19: mol_type = other RNA
  misc_difference 1: note = 2'-O-methyl modified nucleotide with phosphorothioate linkage may be 5' phosphate modified
  modified_base 2: mod_base = OTHER; note = 2'-fluoro modified nucleotide with phosphorothioate linkage
  modified_base 3: mod_base = OTHER; note = 2'-O-methyl modified nucleotide
  modified_base 4: mod_base = OTHER; note = 2'-fluoro modified nucleotide
  modified_base 5: mod_base = OTHER; note = 2'-O-methyl modified nucleotide
  modified_base 6: mod_base = OTHER; note = 2'-fluoro modified nucleotide
  modified_base 7: mod_base = OTHER; note = 2'-O-methyl modified nucleotide
  modified_base 8: mod_base = OTHER; note = 2'-fluoro modified nucleotide
  modified_base 9: mod_base = OTHER; note = 2'-O-methyl modified nucleotide
  modified_base 10: mod_base = OTHER; note = 2'-fluoro modified nucleotide
  modified_base 11: mod_base = OTHER; note = 2'-O-methyl modified nucleotide
  modified_base 12: mod_base = OTHER; note = 2'-fluoro modified nucleotide
  modified_base 13: mod_base = OTHER; note = 2'-O-methyl modified nucleotide
  modified_base 14: mod_base = OTHER; note = 2'-fluoro modified nucleotide with phosphorothioate linkage
  modified_base 15: mod_base = OTHER; note = 2'-O-methyl modified nucleotide with phosphorothioate linkage
  modified_base 16: mod_base = OTHER; note = 2'-fluoro modified nucleotide with phosphorothioate linkage
  modified_base 17: mod_base = OTHER; note = 2'-O-methyl modified nucleotide with phosphorothioate linkage
  modified_base 18: mod_base = OTHER; note = 2'-fluoro modified nucleotide with phosphorothioate linkage
  misc_difference 19: note = 2'-O-methyl modified nucleotide may be trivalent N-acetylgalactosamine modified
nttattttgtcaatatatg

SEQ ID NO: 1797 - RNA, 19 nt, synthetic construct
  source 1..19: mol_type = other RNA
  misc_difference 1: note = 2'-O-methyl modified nucleotide with phosphorothioate linkage may be 5' phosphate modified
  modified_base 2: mod_base = OTHER; note = 2'-fluoro modified nucleotide with phosphorothioate linkage
  modified_base 3: mod_base = OTHER; note = 2'-O-methyl modified nucleotide
  modified_base 4: mod_base = OTHER; note = 2'-fluoro modified nucleotide
  modified_base 5: mod_base = OTHER; note = 2'-O-methyl modified nucleotide
  modified_base 6: mod_base = OTHER; note = 2'-fluoro modified nucleotide
  modified_base 7: mod_base = OTHER; note = 2'-O-methyl modified nucleotide
  modified_base 8: mod_base = OTHER; note = 2'-fluoro modified nucleotide
  modified_base 9: mod_base = OTHER; note = 2'-O-methyl modified nucleotide
  modified_base 10: mod_base = OTHER; note = 2'-fluoro modified nucleotide
  modified_base 11: mod_base = OTHER; note = 2'-O-methyl modified nucleotide
  modified_base 12: mod_base = OTHER; note = 2'-fluoro modified nucleotide
  modified_base 13: mod_base = OTHER; note = 2'-O-methyl modified nucleotide
  modified_base 14: mod_base = OTHER; note = 2'-fluoro modified nucleotide with phosphorothioate linkage
  modified_base 15: mod_base = OTHER; note = 2'-O-methyl modified nucleotide with phosphorothioate linkage
  modified_base 16: mod_base = OTHER; note = 2'-fluoro modified nucleotide with phosphorothioate linkage
  modified_base 17: mod_base = OTHER; note = 2'-O-methyl modified nucleotide with phosphorothioate linkage
  modified_base 18: mod_base = OTHER; note = 2'-fluoro modified nucleotide with phosphorothioate linkage
  misc_difference 19: note = 2'-O-methyl modified nucleotide may be trivalent N-acetylgalactosamine modified
naggcttcaggaaaagagg

SEQ ID NO: 1798 - RNA, 19 nt, synthetic construct
  source 1..19: mol_type = other RNA
  misc_difference 1: note = 2'-O-methyl modified nucleotide with phosphorothioate linkage may be 5' phosphate modified
  modified_base 2: mod_base = OTHER; note = 2'-fluoro modified nucleotide with phosphorothioate linkage
  modified_base 3: mod_base = OTHER; note = 2'-O-methyl modified nucleotide
  modified_base 4: mod_base = OTHER; note = 2'-fluoro modified nucleotide
  modified_base 5: mod_base = OTHER; note = 2'-O-methyl modified nucleotide
  modified_base 6: mod_base = OTHER; note = 2'-fluoro modified nucleotide
  modified_base 7: mod_base = OTHER; note = 2'-O-methyl modified nucleotide
  modified_base 8: mod_base = OTHER; note = 2'-fluoro modified nucleotide
  modified_base 9: mod_base = OTHER; note = 2'-O-methyl modified nucleotide
  modified_base 10: mod_base = OTHER; note = 2'-fluoro modified nucleotide
  modified_base 11: mod_base = OTHER; note = 2'-O-methyl modified nucleotide
  modified_base 12: mod_base = OTHER; note = 2'-fluoro modified nucleotide
  modified_base 13: mod_base = OTHER; note = 2'-O-methyl modified nucleotide
  modified_base 14: mod_base = OTHER; note = 2'-fluoro modified nucleotide with phosphorothioate linkage
  modified_base 15: mod_base = OTHER; note = 2'-O-methyl modified nucleotide with phosphorothioate linkage
  modified_base 16: mod_base = OTHER; note = 2'-fluoro modified nucleotide with phosphorothioate linkage
  modified_base 17: mod_base = OTHER; note = 2'-O-methyl modified nucleotide with phosphorothioate linkage
  modified_base 18: mod_base = OTHER; note = 2'-fluoro modified nucleotide with phosphorothioate linkage
  misc_difference 19: note = 2'-O-methyl modified nucleotide may be trivalent N-acetylgalactosamine modified
nggaaaagagataattcca

SEQ ID NO: 1799 - RNA, 19 nt, synthetic construct
  source 1..19: mol_type = other RNA
  misc_difference 1: note = 2'-O-methyl modified nucleotide with phosphorothioate linkage may be 5' phosphate modified
  modified_base 2: mod_base = OTHER; note = 2'-fluoro modified nucleotide with phosphorothioate linkage
  modified_base 3: mod_base = OTHER; note = 2'-O-methyl modified nucleotide
  modified_base 4: mod_base = OTHER; note = 2'-fluoro modified nucleotide
  modified_base 5: mod_base = OTHER; note = 2'-O-methyl modified nucleotide
  modified_base 6: mod_base = OTHER; note = 2'-fluoro modified nucleotide
  modified_base 7: mod_base = OTHER; note = 2'-O-methyl modified nucleotide
  modified_base 8: mod_base = OTHER; note = 2'-fluoro modified nucleotide
  modified_base 9: mod_base = OTHER; note = 2'-O-methyl modified nucleotide
  modified_base 10: mod_base = OTHER; note = 2'-fluoro modified nucleotide
  modified_base 11: mod_base = OTHER; note = 2'-O-methyl modified nucleotide
  modified_base 12: mod_base = OTHER; note = 2'-fluoro modified nucleotide
  modified_base 13: mod_base = OTHER; note = 2'-O-methyl modified nucleotide
  modified_base 14: mod_base = OTHER; note = 2'-fluoro modified nucleotide with phosphorothioate linkage
  modified_base 15: mod_base = OTHER; note = 2'-O-methyl modified nucleotide with phosphorothioate linkage
  modified_base 16: mod_base = OTHER; note = 2'-fluoro modified nucleotide with phosphorothioate linkage
  modified_base 17: mod_base = OTHER; note = 2'-O-methyl modified nucleotide with phosphorothioate linkage
  modified_base 18: mod_base = OTHER; note = 2'-fluoro modified nucleotide with phosphorothioate linkage
  misc_difference 19: note = 2'-O-methyl modified nucleotide may be trivalent N-acetylgalactosamine modified
ngttacagcaatataaagg

SEQ ID NO: 1800 - RNA, 19 nt, synthetic construct
  source 1..19: mol_type = other RNA
  misc_difference 1: note = 2'-O-methyl modified nucleotide with phosphorothioate linkage may be 5' phosphate modified
  modified_base 2: mod_base = OTHER; note = 2'-fluoro modified nucleotide with phosphorothioate linkage
  modified_base 3: mod_base = OTHER; note = 2'-O-methyl modified nucleotide
  modified_base 4: mod_base = OTHER; note = 2'-fluoro modified nucleotide
  modified_base 5: mod_base = OTHER; note = 2'-O-methyl modified nucleotide
  modified_base 6: mod_base = OTHER; note = 2'-fluoro modified nucleotide
  modified_base 7: mod_base = OTHER; note = 2'-O-methyl modified nucleotide
  modified_base 8: mod_base = OTHER; note = 2'-fluoro modified nucleotide
  modified_base 9: mod_base = OTHER; note = 2'-O-methyl modified nucleotide
  modified_base 10: mod_base = OTHER; note = 2'-fluoro modified nucleotide
  modified_base 11: mod_base = OTHER; note = 2'-O-methyl modified nucleotide
  modified_base 12: mod_base = OTHER; note = 2'-fluoro modified nucleotide
  modified_base 13: mod_base = OTHER; note = 2'-O-methyl modified nucleotide
  modified_base 14: mod_base = OTHER; note = 2'-fluoro modified nucleotide with phosphorothioate linkage
  modified_base 15: mod_base = OTHER; note = 2'-O-methyl modified nucleotide with phosphorothioate linkage
  modified_base 16: mod_base = OTHER; note = 2'-fluoro modified nucleotide with phosphorothioate linkage
  modified_base 17: mod_base = OTHER; note = 2'-O-methyl modified nucleotide with phosphorothioate linkage
  modified_base 18: mod_base = OTHER; note = 2'-fluoro modified nucleotide with phosphorothioate linkage
  misc_difference 19: note = 2'-O-methyl modified nucleotide may be trivalent N-acetylgalactosamine modified
nataagcatatgcaatctc

SEQ ID NO: 1801 - RNA, 19 nt, synthetic construct
  source 1..19: mol_type = other RNA
  misc_difference 1: note = 2'-O-methyl modified nucleotide with phosphorothioate linkage may be 5' phosphate modified
  modified_base 2: mod_base = OTHER; note = 2'-fluoro modified nucleotide with phosphorothioate linkage
  modified_base 3: mod_base = OTHER; note = 2'-O-methyl modified nucleotide
  modified_base 4: mod_base = OTHER; note = 2'-fluoro modified nucleotide
  modified_base 5: mod_base = OTHER; note = 2'-O-methyl modified nucleotide
  modified_base 6: mod_base = OTHER; note = 2'-fluoro modified nucleotide
  modified_base 7: mod_base = OTHER; note = 2'-O-methyl modified nucleotide
  modified_base 8: mod_base = OTHER; note = 2'-fluoro modified nucleotide
  modified_base 9: mod_base = OTHER; note = 2'-O-methyl modified nucleotide
  modified_base 10: mod_base = OTHER; note = 2'-fluoro modified nucleotide
  modified_base 11: mod_base = OTHER; note = 2'-O-methyl modified nucleotide
  modified_base 12: mod_base = OTHER; note = 2'-fluoro modified nucleotide
  modified_base 13: mod_base = OTHER; note = 2'-O-methyl modified nucleotide
  modified_base 14: mod_base = OTHER; note = 2'-fluoro modified nucleotide with phosphorothioate linkage
  modified_base 15: mod_base = OTHER; note = 2'-O-methyl modified nucleotide with phosphorothioate linkage
  modified_base 16: mod_base = OTHER; note = 2'-fluoro modified nucleotide with phosphorothioate linkage
  modified_base 17: mod_base = OTHER; note = 2'-O-methyl modified nucleotide with phosphorothioate linkage
  modified_base 18: mod_base = OTHER; note = 2'-fluoro modified nucleotide with phosphorothioate linkage
  misc_difference 19: note = 2'-O-methyl modified nucleotide may be trivalent N-acetylgalactosamine modified
natattctttaacttcaaa

SEQ ID NO: 1802 - RNA, 19 nt, synthetic construct
  source 1..19: mol_type = other RNA
  misc_difference 1: note = 2'-O-methyl modified nucleotide with phosphorothioate linkage may be 5' phosphate modified
  modified_base 2: mod_base = OTHER; note = 2'-fluoro modified nucleotide with phosphorothioate linkage
  modified_base 3: mod_base = OTHER; note = 2'-O-methyl modified nucleotide
  modified_base 4: mod_base = OTHER; note = 2'-fluoro modified nucleotide
  modified_base 5: mod_base = OTHER; note = 2'-O-methyl modified nucleotide
  modified_base 6: mod_base = OTHER; note = 2'-fluoro modified nucleotide
  modified_base 7: mod_base = OTHER; note = 2'-O-methyl modified nucleotide
  modified_base 8: mod_base = OTHER; note = 2'-fluoro modified nucleotide
  modified_base 9: mod_base = OTHER; note = 2'-O-methyl modified nucleotide
  modified_base 10: mod_base = OTHER; note = 2'-fluoro modified nucleotide
  modified_base 11: mod_base = OTHER; note = 2'-O-methyl modified nucleotide
  modified_base 12: mod_base = OTHER; note = 2'-fluoro modified nucleotide
  modified_base 13: mod_base = OTHER; note = 2'-O-methyl modified nucleotide
  modified_base 14: mod_base = OTHER; note = 2'-fluoro modified nucleotide with phosphorothioate linkage
  modified_base 15: mod_base = OTHER; note = 2'-O-methyl modified nucleotide with phosphorothioate linkage
  modified_base 16: mod_base = OTHER; note = 2'-fluoro modified nucleotide with phosphorothioate linkage
  modified_base 17: mod_base = OTHER; note = 2'-O-methyl modified nucleotide with phosphorothioate linkage
  modified_base 18: mod_base = OTHER; note = 2'-fluoro modified nucleotide with phosphorothioate linkage
  misc_difference 19: note = 2'-O-methyl modified nucleotide may be trivalent N-acetylgalactosamine modified
nagacatctttgaacacct

SEQ ID NO: 1803 - RNA, 19 nt, synthetic construct
  source 1..19: mol_type = other RNA
  misc_difference 1: note = 2'-O-methyl modified nucleotide with phosphorothioate linkage may be 5' phosphate modified
  modified_base 2: mod_base = OTHER; note = 2'-fluoro modified nucleotide with phosphorothioate linkage
  modified_base 3: mod_base = OTHER; note = 2'-O-methyl modified nucleotide
  modified_base 4: mod_base = OTHER; note = 2'-fluoro modified nucleotide
  modified_base 5: mod_base = OTHER; note = 2'-O-methyl modified nucleotide
  modified_base 6: mod_base = OTHER; note = 2'-fluoro modified nucleotide
  modified_base 7: mod_base = OTHER; note = 2'-O-methyl modified nucleotide
  modified_base 8: mod_base = OTHER; note = 2'-fluoro modified nucleotide
  modified_base 9: mod_base = OTHER; note = 2'-O-methyl modified nucleotide
  modified_base 10: mod_base = OTHER; note = 2'-fluoro modified nucleotide
  modified_base 11: mod_base = OTHER; note = 2'-O-methyl modified nucleotide
  modified_base 12: mod_base = OTHER; note = 2'-fluoro modified nucleotide
  modified_base 13: mod_base = OTHER; note = 2'-O-methyl modified nucleotide
  modified_base 14: mod_base = OTHER; note = 2'-fluoro modified nucleotide with phosphorothioate linkage
  modified_base 15: mod_base = OTHER; note = 2'-O-methyl modified nucleotide with phosphorothioate linkage
  modified_base 16: mod_base = OTHER; note = 2'-fluoro modified nucleotide with phosphorothioate linkage
  modified_base 17: mod_base = OTHER; note = 2'-O-methyl modified nucleotide with phosphorothioate linkage
  modified_base 18: mod_base = OTHER; note = 2'-fluoro modified nucleotide with phosphorothioate linkage
  misc_difference 19: note = 2'-O-methyl modified nucleotide may be trivalent N-acetylgalactosamine modified
ncaggaagacatctttgaa

SEQ ID NO: 1804 - RNA, 19 nt, synthetic construct
  source 1..19: mol_type = other RNA
  misc_difference 1: note = 2'-O-methyl modified nucleotide with phosphorothioate linkage may be 5' phosphate modified
  modified_base 2: mod_base = OTHER; note = 2'-fluoro modified nucleotide with phosphorothioate linkage
  modified_base 3: mod_base = OTHER; note = 2'-O-methyl modified nucleotide
  modified_base 4: mod_base = OTHER; note = 2'-fluoro modified nucleotide
  modified_base 5: mod_base = OTHER; note = 2'-O-methyl modified nucleotide
  modified_base 6: mod_base = OTHER; note = 2'-fluoro modified nucleotide
  modified_base 7: mod_base = OTHER; note = 2'-O-methyl modified nucleotide
  modified_base 8: mod_base = OTHER; note = 2'-fluoro modified nucleotide
  modified_base 9: mod_base = OTHER; note = 2'-O-methyl modified nucleotide
  modified_base 10: mod_base = OTHER; note = 2'-fluoro modified nucleotide
  modified_base 11: mod_base = OTHER; note = 2'-O-methyl modified nucleotide
  modified_base 12: mod_base = OTHER; note = 2'-fluoro modified nucleotide
  modified_base 13: mod_base = OTHER; note = 2'-O-methyl modified nucleotide
  modified_base 14: mod_base = OTHER; note = 2'-fluoro modified nucleotide with phosphorothioate linkage
  modified_base 15: mod_base = OTHER; note = 2'-O-methyl modified nucleotide with phosphorothioate linkage
  modified_base 16: mod_base = OTHER; note = 2'-fluoro modified nucleotide with phosphorothioate linkage
  modified_base 17: mod_base = OTHER; note = 2'-O-methyl modified nucleotide with phosphorothioate linkage
  modified_base 18: mod_base = OTHER; note = 2'-fluoro modified nucleotide with phosphorothioate linkage
  misc_difference 19: note = 2'-O-methyl modified nucleotide may be trivalent N-acetylgalactosamine modified
nacagcaatataaaggtac

SEQ ID NO: 1805 - RNA, 19 nt, synthetic construct
  source 1..19: mol_type = other RNA
  misc_difference 1: note = 2'-O-methyl modified nucleotide with phosphorothioate linkage may be 5' phosphate modified
  modified_base 2: mod_base = OTHER; note = 2'-fluoro modified nucleotide with phosphorothioate linkage
  modified_base 3: mod_base = OTHER; note = 2'-O-methyl modified nucleotide
  modified_base 4: mod_base = OTHER; note = 2'-fluoro modified nucleotide
  modified_base 5: mod_base = OTHER; note = 2'-O-methyl modified nucleotide
  modified_base 6: mod_base = OTHER; note = 2'-fluoro modified nucleotide
  modified_base 7: mod_base = OTHER; note = 2'-O-methyl modified nucleotide
  modified_base 8: mod_base = OTHER; note = 2'-fluoro modified nucleotide
  modified_base 9: mod_base = OTHER; note = 2'-O-methyl modified nucleotide
  modified_base 10: mod_base = OTHER; note = 2'-fluoro modified nucleotide
  modified_base 11: mod_base = OTHER; note = 2'-O-methyl modified nucleotide
  modified_base 12: mod_base = OTHER; note = 2'-fluoro modified nucleotide
  modified_base 13: mod_base = OTHER; note = 2'-O-methyl modified nucleotide
  modified_base 14: mod_base = OTHER; note = 2'-fluoro modified nucleotide with phosphorothioate linkage
  modified_base 15: mod_base = OTHER; note = 2'-O-methyl modified nucleotide with phosphorothioate linkage
  modified_base 16: mod_base = OTHER; note = 2'-fluoro modified nucleotide with phosphorothioate linkage
  modified_base 17: mod_base = OTHER; note = 2'-O-methyl modified nucleotide with phosphorothioate linkage
  modified_base 18: mod_base = OTHER; note = 2'-fluoro modified nucleotide with phosphorothioate linkage
  misc_difference 19: note = 2'-O-methyl modified nucleotide may be trivalent N-acetylgalactosamine modified
nattgtcataggttattgg

SEQ ID NO: 1806 - RNA, 19 nt, synthetic construct
  source 1..19: mol_type = other RNA
  misc_difference 1: note = 2'-O-methyl modified nucleotide with phosphorothioate linkage may be 5' phosphate modified
  modified_base 2: mod_base = OTHER; note = 2'-fluoro modified nucleotide with phosphorothioate linkage
  modified_base 3: mod_base = OTHER; note = 2'-O-methyl modified nucleotide
  modified_base 4: mod_base = OTHER; note = 2'-fluoro modified nucleotide
  modified_base 5: mod_base = OTHER; note = 2'-O-methyl modified nucleotide
  modified_base 6: mod_base = OTHER; note = 2'-fluoro modified nucleotide
  modified_base 7: mod_base = OTHER; note = 2'-O-methyl modified nucleotide
  modified_base 8: mod_base = OTHER; note = 2'-fluoro modified nucleotide
  modified_base 9: mod_base = OTHER; note = 2'-O-methyl modified nucleotide
  modified_base 10: mod_base = OTHER; note = 2'-fluoro modified nucleotide
  modified_base 11: mod_base = OTHER; note = 2'-O-methyl modified nucleotide
  modified_base 12: mod_base = OTHER; note = 2'-fluoro modified nucleotide
  modified_base 13: mod_base = OTHER; note = 2'-O-methyl modified nucleotide
  modified_base 14: mod_base = OTHER; note = 2'-fluoro modified nucleotide with phosphorothioate linkage
  modified_base 15: mod_base = OTHER; note = 2'-O-methyl modified nucleotide with phosphorothioate linkage
  modified_base 16: mod_base = OTHER; note = 2'-fluoro modified nucleotide with phosphorothioate linkage
  modified_base 17: mod_base = OTHER; note = 2'-O-methyl modified nucleotide with phosphorothioate linkage
  modified_base 18: mod_base = OTHER; note = 2'-fluoro modified nucleotide with phosphorothioate linkage
  misc_difference 19: note = 2'-O-methyl modified nucleotide may be trivalent N-acetylgalactosamine modified
ngagttattttgtcaatat

SEQ ID NO: 1807 - RNA, 19 nt, synthetic construct
  source 1..19: mol_type = other RNA
  misc_difference 1: note = 2'-O-methyl modified nucleotide with phosphorothioate linkage may be 5' phosphate modified
  modified_base 2: mod_base = OTHER; note = 2'-fluoro modified nucleotide with phosphorothioate linkage
  modified_base 3: mod_base = OTHER; note = 2'-O-methyl modified nucleotide
  modified_base 4: mod_base = OTHER; note = 2'-fluoro modified nucleotide
  modified_base 5: mod_base = OTHER; note = 2'-O-methyl modified nucleotide
  modified_base 6: mod_base = OTHER; note = 2'-fluoro modified nucleotide
  modified_base 7: mod_base = OTHER; note = 2'-O-methyl modified nucleotide
  modified_base 8: mod_base = OTHER; note = 2'-fluoro modified nucleotide
  modified_base 9: mod_base = OTHER; note = 2'-O-methyl modified nucleotide
  modified_base 10: mod_base = OTHER; note = 2'-fluoro modified nucleotide
  modified_base 11: mod_base = OTHER; note = 2'-O-methyl modified nucleotide
  modified_base 12: mod_base = OTHER; note = 2'-fluoro modified nucleotide
  modified_base 13: mod_base = OTHER; note = 2'-O-methyl modified nucleotide
  modified_base 14: mod_base = OTHER; note = 2'-fluoro modified nucleotide with phosphorothioate linkage
  modified_base 15: mod_base = OTHER; note = 2'-O-methyl modified nucleotide with phosphorothioate linkage
  modified_base 16: mod_base = OTHER; note = 2'-fluoro modified nucleotide with phosphorothioate linkage
  modified_base 17: mod_base = OTHER; note = 2'-O-methyl modified nucleotide with phosphorothioate linkage
  modified_base 18: mod_base = OTHER; note = 2'-fluoro modified nucleotide with phosphorothioate linkage
  misc_difference 19: note = 2'-O-methyl modified nucleotide may be trivalent N-acetylgalactosamine modified
ngtgagttattttgtcaat

SEQ ID NO: 1808 - RNA, 19 nt, synthetic construct
  source 1..19: mol_type = other RNA
  misc_difference 1: note = 2'-O-methyl modified nucleotide with phosphorothioate linkage may be 5' phosphate modified
  modified_base 2: mod_base = OTHER; note = 2'-fluoro modified nucleotide with phosphorothioate linkage
  modified_base 3: mod_base = OTHER; note = 2'-O-methyl modified nucleotide
  modified_base 4: mod_base = OTHER; note = 2'-fluoro modified nucleotide
  modified_base 5: mod_base = OTHER; note = 2'-O-methyl modified nucleotide
  modified_base 6: mod_base = OTHER; note = 2'-fluoro modified nucleotide
  modified_base 7: mod_base = OTHER; note = 2'-O-methyl modified nucleotide
  modified_base 8: mod_base = OTHER; note = 2'-fluoro modified nucleotide
  modified_base 9: mod_base = OTHER; note = 2'-O-methyl modified nucleotide
  modified_base 10: mod_base = OTHER; note = 2'-fluoro modified nucleotide
  modified_base 11: mod_base = OTHER; note = 2'-O-methyl modified nucleotide
  modified_base 12: mod_base = OTHER; note = 2'-fluoro modified nucleotide
  modified_base 13: mod_base = OTHER; note = 2'-O-methyl modified nucleotide
  modified_base 14: mod_base = OTHER; note = 2'-fluoro modified nucleotide with phosphorothioate linkage
  modified_base 15: mod_base = OTHER; note = 2'-O-methyl modified nucleotide with phosphorothioate linkage
  modified_base 16: mod_base = OTHER; note = 2'-fluoro modified nucleotide with phosphorothioate linkage
  modified_base 17: mod_base = OTHER; note = 2'-O-methyl modified nucleotide with phosphorothioate linkage
  modified_base 18: mod_base = OTHER; note = 2'-fluoro modified nucleotide with phosphorothioate linkage
  misc_difference 19: note = 2'-O-methyl modified nucleotide may be trivalent N-acetylgalactosamine modified
ntgagttattttgtcaata

SEQ ID NO: 1809 - RNA, 19 nt, synthetic construct
  source 1..19: mol_type = other RNA
  misc_difference 1: note = 2'-O-methyl modified nucleotide with phosphorothioate linkage may be 5' phosphate modified
  modified_base 2: mod_base = OTHER; note = 2'-fluoro modified nucleotide with phosphorothioate linkage
  modified_base 3: mod_base = OTHER; note = 2'-O-methyl modified nucleotide
  modified_base 4: mod_base = OTHER; note = 2'-fluoro modified nucleotide
  modified_base 5: mod_base = OTHER; note = 2'-O-methyl modified nucleotide
  modified_base 6: mod_base = OTHER; note = 2'-fluoro modified nucleotide
  modified_base 7: mod_base = OTHER; note = 2'-O-methyl modified nucleotide
  modified_base 8: mod_base = OTHER; note = 2'-fluoro modified nucleotide
  modified_base 9: mod_base = OTHER; note = 2'-O-methyl modified nucleotide
  modified_base 10: mod_base = OTHER; note = 2'-fluoro modified nucleotide
  modified_base 11: mod_base = OTHER; note = 2'-O-methyl modified nucleotide
  modified_base 12: mod_base = OTHER; note = 2'-fluoro modified nucleotide
  modified_base 13: mod_base = OTHER; note = 2'-O-methyl modified nucleotide
  modified_base 14: mod_base = OTHER; note = 2'-fluoro modified nucleotide with phosphorothioate linkage
  modified_base 15: mod_base = OTHER; note = 2'-O-methyl modified nucleotide with phosphorothioate linkage
  modified_base 16: mod_base = OTHER; note = 2'-fluoro modified nucleotide with phosphorothioate linkage
  modified_base 17: mod_base = OTHER; note = 2'-O-methyl modified nucleotide with phosphorothioate linkage
  modified_base 18: mod_base = OTHER; note = 2'-fluoro modified nucleotide with phosphorothioate linkage
  misc_difference 19: note = 2'-O-methyl modified nucleotide may be trivalent N-acetylgalactosamine modified
naattttccttgaaagatc

SEQ ID NO: 1810 - RNA, 19 nt, synthetic construct
  source 1..19: mol_type = other RNA
  misc_difference 1: note = 2'-O-methyl modified nucleotide with phosphorothioate linkage may be 5' phosphate modified
  modified_base 2: mod_base = OTHER; note = 2'-fluoro modified nucleotide with phosphorothioate linkage
  modified_base 3: mod_base = OTHER; note = 2'-O-methyl modified nucleotide
  modified_base 4: mod_base = OTHER; note = 2'-fluoro modified nucleotide
  modified_base 5: mod_base = OTHER; note = 2'-O-methyl modified nucleotide
  modified_base 6: mod_base = OTHER; note = 2'-fluoro modified nucleotide
  modified_base 7: mod_base = OTHER; note = 2'-O-methyl modified nucleotide
  modified_base 8: mod_base = OTHER; note = 2'-fluoro modified nucleotide
  modified_base 9: mod_base = OTHER; note = 2'-O-methyl modified nucleotide
  modified_base 10: mod_base = OTHER; note = 2'-fluoro modified nucleotide
  modified_base 11: mod_base = OTHER; note = 2'-O-methyl modified nucleotide
  modified_base 12: mod_base = OTHER; note = 2'-fluoro modified nucleotide
  modified_base 13: mod_base = OTHER; note = 2'-O-methyl modified nucleotide
  modified_base 14: mod_base = OTHER; note = 2'-fluoro modified nucleotide with phosphorothioate linkage
  modified_base 15: mod_base = OTHER; note = 2'-O-methyl modified nucleotide with phosphorothioate linkage
  modified_base 16: mod_base = OTHER; note = 2'-fluoro modified nucleotide with phosphorothioate linkage
  modified_base 17: mod_base = OTHER; note = 2'-O-methyl modified nucleotide with phosphorothioate linkage
  modified_base 18: mod_base = OTHER; note = 2'-fluoro modified nucleotide with phosphorothioate linkage
  misc_difference 19: note = 2'-O-methyl modified nucleotide may be trivalent N-acetylgalactosamine modified
nctgttacagcaatataaa

SEQ ID NO: 1811 - RNA, 19 nt, synthetic construct
  source 1..19: mol_type = other RNA
  misc_difference 1: note = 2'-O-methyl modified nucleotide with phosphorothioate linkage may be 5' phosphate modified
  modified_base 2: mod_base = OTHER; note = 2'-fluoro modified nucleotide with phosphorothioate linkage
  modified_base 3: mod_base = OTHER; note = 2'-O-methyl modified nucleotide
  modified_base 4: mod_base = OTHER; note = 2'-fluoro modified nucleotide
  modified_base 5: mod_base = OTHER; note = 2'-O-methyl modified nucleotide
  modified_base 6: mod_base = OTHER; note = 2'-fluoro modified nucleotide
  modified_base 7: mod_base = OTHER; note = 2'-O-methyl modified nucleotide
  modified_base 8: mod_base = OTHER; note = 2'-fluoro modified nucleotide
  modified_base 9: mod_base = OTHER; note = 2'-O-methyl modified nucleotide
  modified_base 10: mod_base = OTHER; note = 2'-fluoro modified nucleotide
  modified_base 11: mod_base = OTHER; note = 2'-O-methyl modified nucleotide
  modified_base 12: mod_base = OTHER; note = 2'-fluoro modified nucleotide
  modified_base 13: mod_base = OTHER; note = 2'-O-methyl modified nucleotide
  modified_base 14: mod_base = OTHER; note = 2'-fluoro modified nucleotide with phosphorothioate linkage
  modified_base 15: mod_base = OTHER; note = 2'-O-methyl modified nucleotide with phosphorothioate linkage
  modified_base 16: mod_base = OTHER; note = 2'-fluoro modified nucleotide with phosphorothioate linkage
  modified_base 17: mod_base = OTHER; note = 2'-O-methyl modified nucleotide with phosphorothioate linkage
  modified_base 18: mod_base = OTHER; note = 2'-fluoro modified nucleotide with phosphorothioate linkage
  misc_difference 19: note = 2'-O-methyl modified nucleotide may be trivalent N-acetylgalactosamine modified
naatccattgtcataggtt

SEQ ID NO: 1812 - RNA, 19 nt, synthetic construct
  source 1..19: mol_type = other RNA
  misc_difference 1: note = 2'-O-methyl modified nucleotide with phosphorothioate linkage may be 5' phosphate modified
  modified_base 2: mod_base = OTHER; note = 2'-fluoro modified nucleotide with phosphorothioate linkage
  modified_base 3: mod_base = OTHER; note = 2'-O-methyl modified nucleotide
  modified_base 4: mod_base = OTHER; note = 2'-fluoro modified nucleotide
  modified_base 5: mod_base = OTHER; note = 2'-O-methyl modified nucleotide
  modified_base 6: mod_base = OTHER; note = 2'-fluoro modified nucleotide
  modified_base 7: mod_base = OTHER; note = 2'-O-methyl modified nucleotide
  modified_base 8: mod_base = OTHER; note = 2'-fluoro modified nucleotide
  modified_base 9: mod_base = OTHER; note = 2'-O-methyl modified nucleotide
  modified_base 10: mod_base = OTHER; note = 2'-fluoro modified nucleotide
  modified_base 11: mod_base = OTHER; note = 2'-O-methyl modified nucleotide
  modified_base 12: mod_base = OTHER; note = 2'-fluoro modified nucleotide
  modified_base 13: mod_base = OTHER; note = 2'-O-methyl modified nucleotide
  modified_base 14: mod_base = OTHER; note = 2'-fluoro modified nucleotide with phosphorothioate linkage
  modified_base 15: mod_base = OTHER; note = 2'-O-methyl modified nucleotide with phosphorothioate linkage
  modified_base 16: mod_base = OTHER; note = 2'-fluoro modified nucleotide with phosphorothioate linkage
  modified_base 17: mod_base = OTHER; note = 2'-O-methyl modified nucleotide with phosphorothioate linkage
  modified_base 18: mod_base = OTHER; note = 2'-fluoro modified nucleotide with phosphorothioate linkage
  misc_difference 19: note = 2'-O-methyl modified nucleotide may be trivalent N-acetylgalactosamine modified
natccattgtcataggtta

SEQ ID NO: 1813 - RNA, 19 nt, synthetic construct
  source 1..19: mol_type = other RNA
  misc_difference 1: note = 2'-O-methyl modified nucleotide with phosphorothioate linkage may be 5' phosphate modified
  modified_base 2: mod_base = OTHER; note = 2'-fluoro modified nucleotide with phosphorothioate linkage
  modified_base 3: mod_base = OTHER; note = 2'-O-methyl modified nucleotide
  modified_base 4: mod_base = OTHER; note = 2'-fluoro modified nucleotide
  modified_base 5: mod_base = OTHER; note = 2'-O-methyl modified nucleotide
  modified_base 6: mod_base = OTHER; note = 2'-fluoro modified nucleotide
  modified_base 7: mod_base = OTHER; note = 2'-O-methyl modified nucleotide
  modified_base 8: mod_base = OTHER; note = 2'-fluoro modified nucleotide
  modified_base 9: mod_base = OTHER; note = 2'-O-methyl modified nucleotide
  modified_base 10: mod_base = OTHER; note = 2'-fluoro modified nucleotide
  modified_base 11: mod_base = OTHER; note = 2'-O-methyl modified nucleotide
  modified_base 12: mod_base = OTHER; note = 2'-fluoro modified nucleotide
  modified_base 13: mod_base = OTHER; note = 2'-O-methyl modified nucleotide
  modified_base 14: mod_base = OTHER; note = 2'-fluoro modified nucleotide with phosphorothioate linkage
  modified_base 15: mod_base = OTHER; note = 2'-O-methyl modified nucleotide with phosphorothioate linkage
  modified_base 16: mod_base = OTHER; note = 2'-fluoro modified nucleotide with phosphorothioate linkage
  modified_base 17: mod_base = OTHER; note = 2'-O-methyl modified nucleotide with phosphorothioate linkage
  modified_base 18: mod_base = OTHER; note = 2'-fluoro modified nucleotide with phosphorothioate linkage
  misc_difference 19: note = 2'-O-methyl modified nucleotide may be trivalent N-acetylgalactosamine modified
nagaaatccattgtcatag

SEQ ID NO: 1814 - RNA, 19 nt, synthetic construct
  source 1..19: mol_type = other RNA
  misc_difference 1: note = 2'-O-methyl modified nucleotide with phosphorothioate linkage may be 5' phosphate modified
  modified_base 2: mod_base = OTHER; note = 2'-fluoro modified nucleotide with phosphorothioate linkage
  modified_base 3: mod_base = OTHER; note = 2'-O-methyl modified nucleotide
  modified_base 4: mod_base = OTHER; note = 2'-fluoro modified nucleotide
  modified_base 5: mod_base = OTHER; note = 2'-O-methyl modified nucleotide
  modified_base 6: mod_base = OTHER; note = 2'-fluoro modified nucleotide
  modified_base 7: mod_base = OTHER; note = 2'-O-methyl modified nucleotide
  modified_base 8: mod_base = OTHER; note = 2'-fluoro modified nucleotide
  modified_base 9: mod_base = OTHER; note = 2'-O-methyl modified nucleotide
  modified_base 10: mod_base = OTHER; note = 2'-fluoro modified nucleotide
  modified_base 11: mod_base = OTHER; note = 2'-O-methyl modified nucleotide
  modified_base 12: mod_base = OTHER; note = 2'-fluoro modified nucleotide
  modified_base 13: mod_base = OTHER; note = 2'-O-methyl modified nucleotide
  modified_base 14: mod_base = OTHER; note = 2'-fluoro modified nucleotide with phosphorothioate linkage
  modified_base 15: mod_base = OTHER; note = 2'-O-methyl modified nucleotide with phosphorothioate linkage
  modified_base 16: mod_base = OTHER; note = 2'-fluoro modified nucleotide with phosphorothioate linkage
  modified_base 17: mod_base = OTHER; note = 2'-O-methyl modified nucleotide with phosphorothioate linkage
  modified_base 18: mod_base = OTHER; note = 2'-fluoro modified nucleotide with phosphorothioate linkage
  misc_difference 19: note = 2'-O-methyl modified nucleotide may be trivalent N-acetylgalactosamine modified
nagacatattctttaactt

SEQ ID NO: 1815 - RNA, 19 nt, synthetic construct
  source 1..19: mol_type = other RNA
  misc_difference 1: note = 2'-O-methyl modified nucleotide with phosphorothioate linkage may be 5' phosphate modified
  modified_base 2: mod_base = OTHER; note = 2'-fluoro modified nucleotide with phosphorothioate linkage
  modified_base 3: mod_base = OTHER; note = 2'-O-methyl modified nucleotide
  modified_base 4: mod_base = OTHER; note = 2'-fluoro modified nucleotide
  modified_base 5: mod_base = OTHER; note = 2'-O-methyl modified nucleotide
  modified_base 6: mod_base = OTHER; note = 2'-fluoro modified nucleotide
  modified_base 7: mod_base = OTHER; note = 2'-O-methyl modified nucleotide
  modified_base 8: mod_base = OTHER; note = 2'-fluoro modified nucleotide
  modified_base 9: mod_base = OTHER; note = 2'-O-methyl modified nucleotide
  modified_base 10: mod_base = OTHER; note = 2'-fluoro modified nucleotide
  modified_base 11: mod_base = OTHER; note = 2'-O-methyl modified nucleotide
  modified_base 12: mod_base = OTHER; note = 2'-fluoro modified nucleotide
  modified_base 13: mod_base = OTHER; note = 2'-O-methyl modified nucleotide
  modified_base 14: mod_base = OTHER; note = 2'-fluoro modified nucleotide with phosphorothioate linkage
  modified_base 15: mod_base = OTHER; note = 2'-O-methyl modified nucleotide with phosphorothioate linkage
  modified_base 16: mod_base = OTHER; note = 2'-fluoro modified nucleotide with phosphorothioate linkage
  modified_base 17: mod_base = OTHER; note = 2'-O-methyl modified nucleotide with phosphorothioate linkage
  modified_base 18: mod_base = OTHER; note = 2'-fluoro modified nucleotide with phosphorothioate linkage
  misc_difference 19: note = 2'-O-methyl modified nucleotide may be trivalent N-acetylgalactosamine modified
nagtgcagattccctccac

SEQ ID NO: 1816 - RNA, 19 nt, synthetic construct
  source 1..19: mol_type = other RNA
  misc_difference 1: note = 2'-O-methyl modified nucleotide with phosphorothioate linkage may be 5' phosphate modified
  modified_base 2: mod_base = OTHER; note = 2'-fluoro modified nucleotide with phosphorothioate linkage
  modified_base 3: mod_base = OTHER; note = 2'-O-methyl modified nucleotide
  modified_base 4: mod_base = OTHER; note = 2'-fluoro modified nucleotide
  modified_base 5: mod_base = OTHER; note = 2'-O-methyl modified nucleotide
  modified_base 6: mod_base = OTHER; note = 2'-fluoro modified nucleotide
  modified_base 7: mod_base = OTHER; note = 2'-O-methyl modified nucleotide
  modified_base 8: mod_base = OTHER; note = 2'-fluoro modified nucleotide
  modified_base 9: mod_base = OTHER; note = 2'-O-methyl modified nucleotide
  modified_base 10: mod_base = OTHER; note = 2'-fluoro modified nucleotide
  modified_base 11: mod_base = OTHER; note = 2'-O-methyl modified nucleotide
  modified_base 12: mod_base = OTHER; note = 2'-fluoro modified nucleotide
  modified_base 13: mod_base = OTHER; note = 2'-O-methyl modified nucleotide
  modified_base 14: mod_base = OTHER; note = 2'-fluoro modified nucleotide with phosphorothioate linkage
  modified_base 15: mod_base = OTHER; note = 2'-O-methyl modified nucleotide with phosphorothioate linkage
  modified_base 16: mod_base = OTHER; note = 2'-fluoro modified nucleotide with phosphorothioate linkage
  modified_base 17: mod_base = OTHER; note = 2'-O-methyl modified nucleotide with phosphorothioate linkage
  modified_base 18: mod_base = OTHER; note = 2'-fluoro modified nucleotide with phosphorothioate linkage
  misc_difference 19: note = 2'-O-methyl modified nucleotide may be trivalent N-acetylgalactosamine modified
ntccattgtcataggttat

SEQ ID NO: 1817 - RNA, 19 nt, synthetic construct
  source 1..19: mol_type = other RNA
  misc_difference 1: note = 2'-O-methyl modified nucleotide with phosphorothioate linkage may be 5' phosphate modified
  modified_base 2: mod_base = OTHER; note = 2'-fluoro modified nucleotide with phosphorothioate linkage
  modified_base 3: mod_base = OTHER; note = 2'-O-methyl modified nucleotide
  modified_base 4: mod_base = OTHER; note = 2'-fluoro modified nucleotide
  modified_base 5: mod_base = OTHER; note = 2'-O-methyl modified nucleotide
  modified_base 6: mod_base = OTHER; note = 2'-fluoro modified nucleotide
  modified_base 7: mod_base = OTHER; note = 2'-O-methyl modified nucleotide
  modified_base 8: mod_base = OTHER; note = 2'-fluoro modified nucleotide
  modified_base 9: mod_base = OTHER; note = 2'-O-methyl modified nucleotide
  modified_base 10: mod_base = OTHER; note = 2'-fluoro modified nucleotide
  modified_base 11: mod_base = OTHER; note = 2'-O-methyl modified nucleotide
  modified_base 12: mod_base = OTHER; note = 2'-fluoro modified nucleotide
  modified_base 13: mod_base = OTHER; note = 2'-O-methyl modified nucleotide
  modified_base 14: mod_base = OTHER; note = 2'-fluoro modified nucleotide with phosphorothioate linkage
  modified_base 15: mod_base = OTHER; note = 2'-O-methyl modified nucleotide with phosphorothioate linkage
  modified_base 16: mod_base = OTHER; note = 2'-fluoro modified nucleotide with phosphorothioate linkage
  modified_base 17: mod_base = OTHER; note = 2'-O-methyl modified nucleotide with phosphorothioate linkage
  modified_base 18: mod_base = OTHER; note = 2'-fluoro modified nucleotide with phosphorothioate linkage
  misc_difference 19: note = 2'-O-methyl modified nucleotide may be trivalent N-acetylgalactosamine modified
ngacatctttgaacacctt

SEQ ID NO: 1818 - RNA, 19 nt, synthetic construct
  source 1..19: mol_type = other RNA
  misc_difference 1: note = 2'-O-methyl modified nucleotide with phosphorothioate linkage may be 5' phosphate modified
  modified_base 2: mod_base = OTHER; note = 2'-fluoro modified nucleotide with phosphorothioate linkage
  modified_base 3: mod_base = OTHER; note = 2'-O-methyl modified nucleotide
  modified_base 4: mod_base = OTHER; note = 2'-fluoro modified nucleotide
  modified_base 5: mod_base = OTHER; note = 2'-O-methyl modified nucleotide
  modified_base 6: mod_base = OTHER; note = 2'-fluoro modified nucleotide
  modified_base 7: mod_base = OTHER; note = 2'-O-methyl modified nucleotide
  modified_base 8: mod_base = OTHER; note = 2'-fluoro modified nucleotide
  modified_base 9: mod_base = OTHER; note = 2'-O-methyl modified nucleotide
  modified_base 10: mod_base = OTHER; note = 2'-fluoro modified nucleotide
  modified_base 11: mod_base = OTHER; note = 2'-O-methyl modified nucleotide
  modified_base 12: mod_base = OTHER; note = 2'-fluoro modified nucleotide
  modified_base 13: mod_base = OTHER; note = 2'-O-methyl modified nucleotide
  modified_base 14: mod_base = OTHER; note = 2'-fluoro modified nucleotide with phosphorothioate linkage
  modified_base 15: mod_base = OTHER; note = 2'-O-methyl modified nucleotide with phosphorothioate linkage
  modified_base 16: mod_base = OTHER; note = 2'-fluoro modified nucleotide with phosphorothioate linkage
  modified_base 17: mod_base = OTHER; note = 2'-O-methyl modified nucleotide with phosphorothioate linkage
  modified_base 18: mod_base = OTHER; note = 2'-fluoro modified nucleotide with phosphorothioate linkage
  misc_difference 19: note = 2'-O-methyl modified nucleotide may be trivalent N-acetylgalactosamine modified
ncattgtcataggttattg

SEQ ID NO: 1819 - RNA, 19 nt, synthetic construct
  source 1..19: mol_type = other RNA
  misc_difference 1: note = 2'-O-methyl modified nucleotide with phosphorothioate linkage may be 5' phosphate modified
  modified_base 2: mod_base = OTHER; note = 2'-fluoro modified nucleotide with phosphorothioate linkage
  modified_base 3: mod_base = OTHER; note = 2'-O-methyl modified nucleotide
  modified_base 4: mod_base = OTHER; note = 2'-fluoro modified nucleotide
  modified_base 5: mod_base = OTHER; note = 2'-O-methyl modified nucleotide
  modified_base 6: mod_base = OTHER; note = 2'-fluoro modified nucleotide
  modified_base 7: mod_base = OTHER; note = 2'-O-methyl modified nucleotide
  modified_base 8: mod_base = OTHER; note = 2'-fluoro modified nucleotide
  modified_base 9: mod_base = OTHER; note = 2'-O-methyl modified nucleotide
  modified_base 10: mod_base = OTHER; note = 2'-fluoro modified nucleotide
  modified_base 11: mod_base = OTHER; note = 2'-O-methyl modified nucleotide
  modified_base 12: mod_base = OTHER; note = 2'-fluoro modified nucleotide
  modified_base 13: mod_base = OTHER; note = 2'-O-methyl modified nucleotide
  modified_base 14: mod_base = OTHER; note = 2'-fluoro modified nucleotide with phosphorothioate linkage
  modified_base 15: mod_base = OTHER; note = 2'-O-methyl modified nucleotide with phosphorothioate linkage
  modified_base 16: mod_base = OTHER; note = 2'-fluoro modified nucleotide with phosphorothioate linkage
  modified_base 17: mod_base = OTHER; note = 2'-O-methyl modified nucleotide with phosphorothioate linkage
  modified_base 18: mod_base = OTHER; note = 2'-fluoro modified nucleotide with phosphorothioate linkage
  misc_difference 19: note = 2'-O-methyl modified nucleotide may be trivalent N-acetylgalactosamine modified
ngaagagaaatccattgtc

SEQ ID NO: 1820 - RNA, 19 nt, synthetic construct
  source 1..19: mol_type = other RNA
  misc_difference 1: note = 2'-O-methyl modified nucleotide with phosphorothioate linkage may be 5' phosphate modified
  modified_base 2: mod_base = OTHER; note = 2'-fluoro modified nucleotide with phosphorothioate linkage
  modified_base 3: mod_base = OTHER; note = 2'-O-methyl modified nucleotide
  modified_base 4: mod_base = OTHER; note = 2'-fluoro modified nucleotide
  modified_base 5: mod_base = OTHER; note = 2'-O-methyl modified nucleotide
  modified_base 6: mod_base = OTHER; note = 2'-fluoro modified nucleotide
  modified_base 7: mod_base = OTHER; note = 2'-O-methyl modified nucleotide
  modified_base 8: mod_base = OTHER; note = 2'-fluoro modified nucleotide
  modified_base 9: mod_base = OTHER; note = 2'-O-methyl modified nucleotide
  modified_base 10: mod_base = OTHER; note = 2'-fluoro modified nucleotide
  modified_base 11: mod_base = OTHER; note = 2'-O-methyl modified nucleotide
  modified_base 12: mod_base = OTHER; note = 2'-fluoro modified nucleotide
  modified_base 13: mod_base = OTHER; note = 2'-O-methyl modified nucleotide
  modified_base 14: mod_base = OTHER; note = 2'-fluoro modified nucleotide with phosphorothioate linkage
  modified_base 15: mod_base = OTHER; note = 2'-O-methyl modified nucleotide with phosphorothioate linkage
  modified_base 16: mod_base = OTHER; note = 2'-fluoro modified nucleotide with phosphorothioate linkage
  modified_base 17: mod_base = OTHER; note = 2'-O-methyl modified nucleotide with phosphorothioate linkage
  modified_base 18: mod_base = OTHER; note = 2'-fluoro modified nucleotide with phosphorothioate linkage
  misc_difference 19: note = 2'-O-methyl modified nucleotide may be trivalent N-acetylgalactosamine modified
nacatattctttaacttca

SEQ ID NO: 1821 - RNA, 19 nt, synthetic construct
  source 1..19: mol_type = other RNA
  misc_difference 1: note = 2'-O-methyl modified nucleotide with phosphorothioate linkage may be 5' phosphate modified
  modified_base 2: mod_base = OTHER; note = 2'-fluoro modified nucleotide with phosphorothioate linkage
  modified_base 3: mod_base = OTHER; note = 2'-O-methyl modified nucleotide
  modified_base 4: mod_base = OTHER; note = 2'-fluoro modified nucleotide
  modified_base 5: mod_base = OTHER; note = 2'-O-methyl modified nucleotide
  modified_base 6: mod_base = OTHER; note = 2'-fluoro modified nucleotide
  modified_base 7: mod_base = OTHER; note = 2'-O-methyl modified nucleotide
  modified_base 8: mod_base = OTHER; note = 2'-fluoro modified nucleotide
  modified_base 9: mod_base = OTHER; note = 2'-O-methyl modified nucleotide
  modified_base 10: mod_base = OTHER; note = 2'-fluoro modified nucleotide
  modified_base 11: mod_base = OTHER; note = 2'-O-methyl modified nucleotide
  modified_base 12: mod_base = OTHER; note = 2'-fluoro modified nucleotide
  modified_base 13: mod_base = OTHER; note = 2'-O-methyl modified nucleotide
  modified_base 14: mod_base = OTHER; note = 2'-fluoro modified nucleotide with phosphorothioate linkage
  modified_base 15: mod_base = OTHER; note = 2'-O-methyl modified nucleotide with phosphorothioate linkage
  modified_base 16: mod_base = OTHER; note = 2'-fluoro modified nucleotide with phosphorothioate linkage
  modified_base 17: mod_base = OTHER; note = 2'-O-methyl modified nucleotide with phosphorothioate linkage
  modified_base 18: mod_base = OTHER; note = 2'-fluoro modified nucleotide with phosphorothioate linkage
  misc_difference 19: note = 2'-O-methyl modified nucleotide may be trivalent N-acetylgalactosamine modified
nagtccttttacactcaaa

SEQ ID NO: 1822 - RNA, 19 nt, synthetic construct
  source 1..19: mol_type = other RNA
  misc_difference 1: note = 2'-O-methyl modified nucleotide with phosphorothioate linkage may be 5' phosphate modified
  modified_base 2: mod_base = OTHER; note = 2'-fluoro modified nucleotide with phosphorothioate linkage
  modified_base 3: mod_base = OTHER; note = 2'-O-methyl modified nucleotide
  modified_base 4: mod_base = OTHER; note = 2'-fluoro modified nucleotide
  modified_base 5: mod_base = OTHER; note = 2'-O-methyl modified nucleotide
  modified_base 6: mod_base = OTHER; note = 2'-fluoro modified nucleotide
  modified_base 7: mod_base = OTHER; note = 2'-O-methyl modified nucleotide
  modified_base 8: mod_base = OTHER; note = 2'-fluoro modified nucleotide
  modified_base 9: mod_base = OTHER; note = 2'-O-methyl modified nucleotide
  modified_base 10: mod_base = OTHER; note = 2'-fluoro modified nucleotide
  modified_base 11: mod_base = OTHER; note = 2'-O-methyl modified nucleotide
  modified_base 12: mod_base = OTHER; note = 2'-fluoro modified nucleotide
  modified_base 13: mod_base = OTHER; note = 2'-O-methyl modified nucleotide
  modified_base 14: mod_base = OTHER; note = 2'-fluoro modified nucleotide with phosphorothioate linkage
  modified_base 15: mod_base = OTHER; note = 2'-O-methyl modified nucleotide with phosphorothioate linkage
  modified_base 16: mod_base = OTHER; note = 2'-fluoro modified nucleotide with phosphorothioate linkage
  modified_base 17: mod_base = OTHER; note = 2'-O-methyl modified nucleotide with phosphorothioate linkage
  modified_base 18: mod_base = OTHER; note = 2'-fluoro modified nucleotide with phosphorothioate linkage
  misc_difference 19: note = 2'-O-methyl modified nucleotide may be trivalent N-acetylgalactosamine modified
nattttccttgaaagatcc

SEQ ID NO: 1823 - RNA, 19 nt, synthetic construct
  source 1..19: mol_type = other RNA
  misc_difference 1: note = 2'-O-methyl modified nucleotide with phosphorothioate linkage may be 5' phosphate modified
  modified_base 2: mod_base = OTHER; note = 2'-fluoro modified nucleotide with phosphorothioate linkage
  modified_base 3: mod_base = OTHER; note = 2'-O-methyl modified nucleotide
  modified_base 4: mod_base = OTHER; note = 2'-fluoro modified nucleotide
  modified_base 5: mod_base = OTHER; note = 2'-O-methyl modified nucleotide
  modified_base 6: mod_base = OTHER; note = 2'-fluoro modified nucleotide
  modified_base 7: mod_base = OTHER; note = 2'-O-methyl modified nucleotide
  modified_base 8: mod_base = OTHER; note = 2'-fluoro modified nucleotide
  modified_base 9: mod_base = OTHER; note = 2'-O-methyl modified nucleotide
  modified_base 10: mod_base = OTHER; note = 2'-fluoro modified nucleotide
  modified_base 11: mod_base = OTHER; note = 2'-O-methyl modified nucleotide
  modified_base 12: mod_base = OTHER; note = 2'-fluoro modified nucleotide
  modified_base 13: mod_base = OTHER; note = 2'-O-methyl modified nucleotide
  modified_base 14: mod_base = OTHER; note = 2'-fluoro modified nucleotide with phosphorothioate linkage
  modified_base 15: mod_base = OTHER; note = 2'-O-methyl modified nucleotide with phosphorothioate linkage
  modified_base 16: mod_base = OTHER; note = 2'-fluoro modified nucleotide with phosphorothioate linkage
  modified_base 17: mod_base = OTHER; note = 2'-O-methyl modified nucleotide with phosphorothioate linkage
  modified_base 18: mod_base = OTHER; note = 2'-fluoro modified nucleotide with phosphorothioate linkage
  misc_difference 19: note = 2'-O-methyl modified nucleotide may be trivalent N-acetylgalactosamine modified
ngaaattgtattttatctg

SEQ ID NO: 1824 - RNA, 19 nt, synthetic construct
  source 1..19: mol_type = other RNA
  misc_difference 1: note = 2'-O-methyl modified nucleotide with phosphorothioate linkage may be 5' phosphate modified
  modified_base 2: mod_base = OTHER; note = 2'-fluoro modified nucleotide with phosphorothioate linkage
  modified_base 3: mod_base = OTHER; note = 2'-O-methyl modified nucleotide
  modified_base 4: mod_base = OTHER; note = 2'-fluoro modified nucleotide
  modified_base 5: mod_base = OTHER; note = 2'-O-methyl modified nucleotide
  modified_base 6: mod_base = OTHER; note = 2'-fluoro modified nucleotide
  modified_base 7: mod_base = OTHER; note = 2'-O-methyl modified nucleotide
  modified_base 8: mod_base = OTHER; note = 2'-fluoro modified nucleotide
  modified_base 9: mod_base = OTHER; note = 2'-O-methyl modified nucleotide
  modified_base 10: mod_base = OTHER; note = 2'-fluoro modified nucleotide
  modified_base 11: mod_base = OTHER; note = 2'-O-methyl modified nucleotide
  modified_base 12: mod_base = OTHER; note = 2'-fluoro modified nucleotide
  modified_base 13: mod_base = OTHER; note = 2'-O-methyl modified nucleotide
  modified_base 14: mod_base = OTHER; note = 2'-fluoro modified nucleotide with phosphorothioate linkage
  modified_base 15: mod_base = OTHER; note = 2'-O-methyl modified nucleotide with phosphorothioate linkage
  modified_base 16: mod_base = OTHER; note = 2'-fluoro modified nucleotide with phosphorothioate linkage
  modified_base 17: mod_base = OTHER; note = 2'-O-methyl modified nucleotide with phosphorothioate linkage
  modified_base 18: mod_base = OTHER; note = 2'-fluoro modified nucleotide with phosphorothioate linkage
  misc_difference 19: note = 2'-O-methyl modified nucleotide may be trivalent N-acetylgalactosamine modified
ngtaatttcaaaattctta

SEQ ID NO: 1825 - RNA, 19 nt, synthetic construct
  source 1..19: mol_type = other RNA
  misc_difference 1: note = 2'-O-methyl modified nucleotide with phosphorothioate linkage may be 5' phosphate modified
  modified_base 2: mod_base = OTHER; note = 2'-fluoro modified nucleotide with phosphorothioate linkage
  modified_base 3: mod_base = OTHER; note = 2'-O-methyl modified nucleotide
  modified_base 4: mod_base = OTHER; note = 2'-fluoro modified nucleotide
  modified_base 5: mod_base = OTHER; note = 2'-O-methyl modified nucleotide
  modified_base 6: mod_base = OTHER; note = 2'-fluoro modified nucleotide
  modified_base 7: mod_base = OTHER; note = 2'-O-methyl modified nucleotide
  modified_base 8: mod_base = OTHER; note = 2'-fluoro modified nucleotide
  modified_base 9: mod_base = OTHER; note = 2'-O-methyl modified nucleotide
  modified_base 10: mod_base = OTHER; note = 2'-fluoro modified nucleotide
  modified_base 11: mod_base = OTHER; note = 2'-O-methyl modified nucleotide
  modified_base 12: mod_base = OTHER; note = 2'-fluoro modified nucleotide
  modified_base 13: mod_base = OTHER; note = 2'-O-methyl modified nucleotide
  modified_base 14: mod_base = OTHER; note = 2'-fluoro modified nucleotide with phosphorothioate linkage
  modified_base 15: mod_base = OTHER; note = 2'-O-methyl modified nucleotide with phosphorothioate linkage
  modified_base 16: mod_base = OTHER; note = 2'-fluoro modified nucleotide with phosphorothioate linkage
  modified_base 17: mod_base = OTHER; note = 2'-O-methyl modified nucleotide with phosphorothioate linkage
  modified_base 18: mod_base = OTHER; note = 2'-fluoro modified nucleotide with phosphorothioate linkage
  misc_difference 19: note = 2'-O-methyl modified nucleotide may be trivalent N-acetylgalactosamine modified
naaaattcttaaagttctt

SEQ ID NO: 1826 - RNA, 19 nt, synthetic construct
  source 1..19: mol_type = other RNA
  misc_difference 1: note = 2'-O-methyl modified nucleotide with phosphorothioate linkage may be 5' phosphate modified
  modified_base 2: mod_base = OTHER; note = 2'-fluoro modified nucleotide with phosphorothioate linkage
  modified_base 3: mod_base = OTHER; note = 2'-O-methyl modified nucleotide
  modified_base 4: mod_base = OTHER; note = 2'-fluoro modified nucleotide
  modified_base 5: mod_base = OTHER; note = 2'-O-methyl modified nucleotide
  modified_base 6: mod_base = OTHER; note = 2'-fluoro modified nucleotide
  modified_base 7: mod_base = OTHER; note = 2'-O-methyl modified nucleotide
  modified_base 8: mod_base = OTHER; note = 2'-fluoro modified nucleotide
  modified_base 9: mod_base = OTHER; note = 2'-O-methyl modified nucleotide
  modified_base 10: mod_base = OTHER; note = 2'-fluoro modified nucleotide
  modified_base 11: mod_base = OTHER; note = 2'-O-methyl modified nucleotide
  modified_base 12: mod_base = OTHER; note = 2'-fluoro modified nucleotide
  modified_base 13: mod_base = OTHER; note = 2'-O-methyl modified nucleotide
  modified_base 14: mod_base = OTHER; note = 2'-fluoro modified nucleotide with phosphorothioate linkage
  modified_base 15: mod_base = OTHER; note = 2'-O-methyl modified nucleotide with phosphorothioate linkage
  modified_base 16: mod_base = OTHER; note = 2'-fluoro modified nucleotide with phosphorothioate linkage
  modified_base 17: mod_base = OTHER; note = 2'-O-methyl modified nucleotide with phosphorothioate linkage
  modified_base 18: mod_base = OTHER; note = 2'-fluoro modified nucleotide with phosphorothioate linkage
  misc_difference 19: note = 2'-O-methyl modified nucleotide may be trivalent N-acetylgalactosamine modified
ngaattttggttctgctct

SEQ ID NO: 1827 - RNA, 19 nt, synthetic construct
  source 1..19: mol_type = other RNA
  misc_difference 1: note = 2'-O-methyl modified nucleotide with phosphorothioate linkage may be 5' phosphate modified
  modified_base 2: mod_base = OTHER; note = 2'-fluoro modified nucleotide with phosphorothioate linkage
  modified_base 3: mod_base = OTHER; note = 2'-O-methyl modified nucleotide
  modified_base 4: mod_base = OTHER; note = 2'-fluoro modified nucleotide
  modified_base 5: mod_base = OTHER; note = 2'-O-methyl modified nucleotide
  modified_base 6: mod_base = OTHER; note = 2'-fluoro modified nucleotide
  modified_base 7: mod_base = OTHER; note = 2'-O-methyl modified nucleotide
  modified_base 8: mod_base = OTHER; note = 2'-fluoro modified nucleotide
  modified_base 9: mod_base = OTHER; note = 2'-O-methyl modified nucleotide
  modified_base 10: mod_base = OTHER; note = 2'-fluoro modified nucleotide
  modified_base 11: mod_base = OTHER; note = 2'-O-methyl modified nucleotide
  modified_base 12: mod_base = OTHER; note = 2'-fluoro modified nucleotide
  modified_base 13: mod_base = OTHER; note = 2'-O-methyl modified nucleotide
  modified_base 14: mod_base = OTHER; note = 2'-fluoro modified nucleotide with phosphorothioate linkage
  modified_base 15: mod_base = OTHER; note = 2'-O-methyl modified nucleotide with phosphorothioate linkage
  modified_base 16: mod_base = OTHER; note = 2'-fluoro modified nucleotide with phosphorothioate linkage
  modified_base 17: mod_base = OTHER; note = 2'-O-methyl modified nucleotide with phosphorothioate linkage
  modified_base 18: mod_base = OTHER; note = 2'-fluoro modified nucleotide with phosphorothioate linkage
  misc_difference 19: note = 2'-O-methyl modified nucleotide may be trivalent N-acetylgalactosamine modified
ngtcattttataattatgt

SEQ ID NO: 1828 - RNA, 19 nt, synthetic construct
  source 1..19: mol_type = other RNA
  misc_difference 1: note = 2'-O-methyl modified nucleotide with phosphorothioate linkage may be 5' phosphate modified
  modified_base 2: mod_base = OTHER; note = 2'-fluoro modified nucleotide with phosphorothioate linkage
  modified_base 3: mod_base = OTHER; note = 2'-O-methyl modified nucleotide
  modified_base 4: mod_base = OTHER; note = 2'-fluoro modified nucleotide
  modified_base 5: mod_base = OTHER; note = 2'-O-methyl modified nucleotide
  modified_base 6: mod_base = OTHER; note = 2'-fluoro modified nucleotide
  modified_base 7: mod_base = OTHER; note = 2'-O-methyl modified nucleotide
  modified_base 8: mod_base = OTHER; note = 2'-fluoro modified nucleotide
  modified_base 9: mod_base = OTHER; note = 2'-O-methyl modified nucleotide
  modified_base 10: mod_base = OTHER; note = 2'-fluoro modified nucleotide
  modified_base 11: mod_base = OTHER; note = 2'-O-methyl modified nucleotide
  modified_base 12: mod_base = OTHER; note = 2'-fluoro modified nucleotide
  modified_base 13: mod_base = OTHER; note = 2'-O-methyl modified nucleotide
  modified_base 14: mod_base = OTHER; note = 2'-fluoro modified nucleotide with phosphorothioate linkage
  modified_base 15: mod_base = OTHER; note = 2'-O-methyl modified nucleotide with phosphorothioate linkage
  modified_base 16: mod_base = OTHER; note = 2'-fluoro modified nucleotide with phosphorothioate linkage
  modified_base 17: mod_base = OTHER; note = 2'-O-methyl modified nucleotide with phosphorothioate linkage
  modified_base 18: mod_base = OTHER; note = 2'-fluoro modified nucleotide with phosphorothioate linkage
  misc_difference 19: note = 2'-O-methyl modified nucleotide may be trivalent N-acetylgalactosamine modified
ncaaatcctgtactgacaa

SEQ ID NO: 1829 - RNA, 19 nt, synthetic construct
  source 1..19: mol_type = other RNA
  misc_difference 1: note = 2'-O-methyl modified nucleotide with phosphorothioate linkage may be 5' phosphate modified
  modified_base 2: mod_base = OTHER; note = 2'-fluoro modified nucleotide with phosphorothioate linkage
  modified_base 3: mod_base = OTHER; note = 2'-O-methyl modified nucleotide
  modified_base 4: mod_base = OTHER; note = 2'-fluoro modified nucleotide
  modified_base 5: mod_base = OTHER; note = 2'-O-methyl modified nucleotide
  modified_base 6: mod_base = OTHER; note = 2'-fluoro modified nucleotide
  modified_base 7: mod_base = OTHER; note = 2'-O-methyl modified nucleotide
  modified_base 8: mod_base = OTHER; note = 2'-fluoro modified nucleotide
  modified_base 9: mod_base = OTHER; note = 2'-O-methyl modified nucleotide
  modified_base 10: mod_base = OTHER; note = 2'-fluoro modified nucleotide
  modified_base 11: mod_base = OTHER; note = 2'-O-methyl modified nucleotide
  modified_base 12: mod_base = OTHER; note = 2'-fluoro modified nucleotide
  modified_base 13: mod_base = OTHER; note = 2'-O-methyl modified nucleotide
  modified_base 14: mod_base = OTHER; note = 2'-fluoro modified nucleotide with phosphorothioate linkage
  modified_base 15: mod_base = OTHER; note = 2'-O-methyl modified nucleotide with phosphorothioate linkage
  modified_base 16: mod_base = OTHER; note = 2'-fluoro modified nucleotide with phosphorothioate linkage
  modified_base 17: mod_base = OTHER; note = 2'-O-methyl modified nucleotide with phosphorothioate linkage
  modified_base 18: mod_base = OTHER; note = 2'-fluoro modified nucleotide with phosphorothioate linkage
  misc_difference 19: note = 2'-O-methyl modified nucleotide may be trivalent N-acetylgalactosamine modified
ngataacttttaatagaga

SEQ ID NO: 1830 - RNA, 19 nt, synthetic construct
  source 1..19: mol_type = other RNA
  misc_difference 1: note = 2'-O-methyl modified nucleotide with phosphorothioate linkage may be 5' phosphate modified
  modified_base 2: mod_base = OTHER; note = 2'-fluoro modified nucleotide with phosphorothioate linkage
  modified_base 3: mod_base = OTHER; note = 2'-O-methyl modified nucleotide
  modified_base 4: mod_base = OTHER; note = 2'-fluoro modified nucleotide
  modified_base 5: mod_base = OTHER; note = 2'-O-methyl modified nucleotide
  modified_base 6: mod_base = OTHER; note = 2'-fluoro modified nucleotide
  modified_base 7: mod_base = OTHER; note = 2'-O-methyl modified nucleotide
  modified_base 8: mod_base = OTHER; note = 2'-fluoro modified nucleotide
  modified_base 9: mod_base = OTHER; note = 2'-O-methyl modified nucleotide
  modified_base 10: mod_base = OTHER; note = 2'-fluoro modified nucleotide
  modified_base 11: mod_base = OTHER; note = 2'-O-methyl modified nucleotide
  modified_base 12: mod_base = OTHER; note = 2'-fluoro modified nucleotide
  modified_base 13: mod_base = OTHER; note = 2'-O-methyl modified nucleotide
  modified_base 14: mod_base = OTHER; note = 2'-fluoro modified nucleotide with phosphorothioate linkage
  modified_base 15: mod_base = OTHER; note = 2'-O-methyl modified nucleotide with phosphorothioate linkage
  modified_base 16: mod_base = OTHER; note = 2'-fluoro modified nucleotide with phosphorothioate linkage
  modified_base 17: mod_base = OTHER; note = 2'-O-methyl modified nucleotide with phosphorothioate linkage
  modified_base 18: mod_base = OTHER; note = 2'-fluoro modified nucleotide with phosphorothioate linkage
  misc_difference 19: note = 2'-O-methyl modified nucleotide may be trivalent N-acetylgalactosamine modified
nttaagtcttctcttattc

SEQ ID NO: 1831 - RNA, 19 nt, synthetic construct
  source 1..19: mol_type = other RNA
  misc_difference 1: note = 2'-O-methyl modified nucleotide with phosphorothioate linkage may be 5' phosphate modified
  modified_base 2: mod_base = OTHER; note = 2'-fluoro modified nucleotide with phosphorothioate linkage
  modified_base 3: mod_base = OTHER; note = 2'-O-methyl modified nucleotide
  modified_base 4: mod_base = OTHER; note = 2'-fluoro modified nucleotide
  modified_base 5: mod_base = OTHER; note = 2'-O-methyl modified nucleotide
  modified_base 6: mod_base = OTHER; note = 2'-fluoro modified nucleotide
  modified_base 7: mod_base = OTHER; note = 2'-O-methyl modified nucleotide
  modified_base 8: mod_base = OTHER; note = 2'-fluoro modified nucleotide
  modified_base 9: mod_base = OTHER; note = 2'-O-methyl modified nucleotide
  modified_base 10: mod_base = OTHER; note = 2'-fluoro modified nucleotide
  modified_base 11: mod_base = OTHER; note = 2'-O-methyl modified nucleotide
  modified_base 12: mod_base = OTHER; note = 2'-fluoro modified nucleotide
  modified_base 13: mod_base = OTHER; note = 2'-O-methyl modified nucleotide
  modified_base 14: mod_base = OTHER; note = 2'-fluoro modified nucleotide with phosphorothioate linkage
  modified_base 15: mod_base = OTHER; note = 2'-O-methyl modified nucleotide with phosphorothioate linkage
  modified_base 16: mod_base = OTHER; note = 2'-fluoro modified nucleotide with phosphorothioate linkage
  modified_base 17: mod_base = OTHER; note = 2'-O-methyl modified nucleotide with phosphorothioate linkage
  modified_base 18: mod_base = OTHER; note = 2'-fluoro modified nucleotide with phosphorothioate linkage
  misc_difference 19: note = 2'-O-methyl modified nucleotide may be trivalent N-acetylgalactosamine modified
nataattccaatatgatca

SEQ ID NO: 1832 - RNA, 19 nt, synthetic construct
  source 1..19: mol_type = other RNA
  misc_difference 1: note = 2'-O-methyl modified nucleotide with phosphorothioate linkage may be 5' phosphate modified
  modified_base 2: mod_base = OTHER; note = 2'-fluoro modified nucleotide with phosphorothioate linkage
  modified_base 3: mod_base = OTHER; note = 2'-O-methyl modified nucleotide
  modified_base 4: mod_base = OTHER; note = 2'-fluoro modified nucleotide
  modified_base 5: mod_base = OTHER; note = 2'-O-methyl modified nucleotide
  modified_base 6: mod_base = OTHER; note = 2'-fluoro modified nucleotide
  modified_base 7: mod_base = OTHER; note = 2'-O-methyl modified nucleotide
  modified_base 8: mod_base = OTHER; note = 2'-fluoro modified nucleotide
  modified_base 9: mod_base = OTHER; note = 2'-O-methyl modified nucleotide
  modified_base 10: mod_base = OTHER; note = 2'-fluoro modified nucleotide
  modified_base 11: mod_base = OTHER; note = 2'-O-methyl modified nucleotide
  modified_base 12: mod_base = OTHER; note = 2'-fluoro modified nucleotide
  modified_base 13: mod_base = OTHER; note = 2'-O-methyl modified nucleotide
  modified_base 14: mod_base = OTHER; note = 2'-fluoro modified nucleotide with phosphorothioate linkage
  modified_base 15: mod_base = OTHER; note = 2'-O-methyl modified nucleotide with phosphorothioate linkage
  modified_base 16: mod_base = OTHER; note = 2'-fluoro modified nucleotide with phosphorothioate linkage
  modified_base 17: mod_base = OTHER; note = 2'-O-methyl modified nucleotide with phosphorothioate linkage
  modified_base 18: mod_base = OTHER; note = 2'-fluoro modified nucleotide with phosphorothioate linkage
  misc_difference 19: note = 2'-O-methyl modified nucleotide may be trivalent N-acetylgalactosamine modified
ngataaatgaacatggcct

SEQ ID NO: 1833 - RNA, 19 nt, synthetic construct
  source 1..19: mol_type = other RNA
  misc_difference 1: note = 2'-O-methyl modified nucleotide with phosphorothioate linkage may be 5' phosphate modified
  modified_base 2: mod_base = OTHER; note = 2'-fluoro modified nucleotide with phosphorothioate linkage
  modified_base 3: mod_base = OTHER; note = 2'-O-methyl modified nucleotide
  modified_base 4: mod_base = OTHER; note = 2'-fluoro modified nucleotide
  modified_base 5: mod_base = OTHER; note = 2'-O-methyl modified nucleotide
  modified_base 6: mod_base = OTHER; note = 2'-fluoro modified nucleotide
  modified_base 7: mod_base = OTHER; note = 2'-O-methyl modified nucleotide
  modified_base 8: mod_base = OTHER; note = 2'-fluoro modified nucleotide
  modified_base 9: mod_base = OTHER; note = 2'-O-methyl modified nucleotide
  modified_base 10: mod_base = OTHER; note = 2'-fluoro modified nucleotide
  modified_base 11: mod_base = OTHER; note = 2'-O-methyl modified nucleotide
  modified_base 12: mod_base = OTHER; note = 2'-fluoro modified nucleotide
  modified_base 13: mod_base = OTHER; note = 2'-O-methyl modified nucleotide
  modified_base 14: mod_base = OTHER; note = 2'-fluoro modified nucleotide with phosphorothioate linkage
  modified_base 15: mod_base = OTHER; note = 2'-O-methyl modified nucleotide with phosphorothioate linkage
  modified_base 16: mod_base = OTHER; note = 2'-fluoro modified nucleotide with phosphorothioate linkage
  modified_base 17: mod_base = OTHER; note = 2'-O-methyl modified nucleotide with phosphorothioate linkage
  modified_base 18: mod_base = OTHER; note = 2'-fluoro modified nucleotide with phosphorothioate linkage
  misc_difference 19: note = 2'-O-methyl modified nucleotide may be trivalent N-acetylgalactosamine modified
naaggttcatcattttctt

SEQ ID NO: 1834 - RNA, 19 nt, synthetic construct
  source 1..19: mol_type = other RNA
  misc_difference 1: note = 2'-O-methyl modified nucleotide with phosphorothioate linkage may be 5' phosphate modified
  modified_base 2: mod_base = OTHER; note = 2'-fluoro modified nucleotide with phosphorothioate linkage
  modified_base 3: mod_base = OTHER; note = 2'-O-methyl modified nucleotide
  modified_base 4: mod_base = OTHER; note = 2'-fluoro modified nucleotide
  modified_base 5: mod_base = OTHER; note = 2'-O-methyl modified nucleotide
  modified_base 6: mod_base = OTHER; note = 2'-fluoro modified nucleotide
  modified_base 7: mod_base = OTHER; note = 2'-O-methyl modified nucleotide
  modified_base 8: mod_base = OTHER; note = 2'-fluoro modified nucleotide
  modified_base 9: mod_base = OTHER; note = 2'-O-methyl modified nucleotide
  modified_base 10: mod_base = OTHER; note = 2'-fluoro modified nucleotide
  modified_base 11: mod_base = OTHER; note = 2'-O-methyl modified nucleotide
  modified_base 12: mod_base = OTHER; note = 2'-fluoro modified nucleotide
  modified_base 13: mod_base = OTHER; note = 2'-O-methyl modified nucleotide
  modified_base 14: mod_base = OTHER; note = 2'-fluoro modified nucleotide with phosphorothioate linkage
  modified_base 15: mod_base = OTHER; note = 2'-O-methyl modified nucleotide with phosphorothioate linkage
  modified_base 16: mod_base = OTHER; note = 2'-fluoro modified nucleotide with phosphorothioate linkage
  modified_base 17: mod_base = OTHER; note = 2'-O-methyl modified nucleotide with phosphorothioate linkage
  modified_base 18: mod_base = OTHER; note = 2'-fluoro modified nucleotide with phosphorothioate linkage
  misc_difference 19: note = 2'-O-methyl modified nucleotide may be trivalent N-acetylgalactosamine modified
nggaagtgctataaaacat

SEQ ID NO: 1835 - RNA, 19 nt, synthetic construct
  source 1..19: mol_type = other RNA
  misc_difference 1: note = 2'-O-methyl modified nucleotide with phosphorothioate linkage may be 5' phosphate modified
  modified_base 2: mod_base = OTHER; note = 2'-fluoro modified nucleotide with phosphorothioate linkage
  modified_base 3: mod_base = OTHER; note = 2'-O-methyl modified nucleotide
  modified_base 4: mod_base = OTHER; note = 2'-fluoro modified nucleotide
  modified_base 5: mod_base = OTHER; note = 2'-O-methyl modified nucleotide
  modified_base 6: mod_base = OTHER; note = 2'-fluoro modified nucleotide
  modified_base 7: mod_base = OTHER; note = 2'-O-methyl modified nucleotide
  modified_base 8: mod_base = OTHER; note = 2'-fluoro modified nucleotide
  modified_base 9: mod_base = OTHER; note = 2'-O-methyl modified nucleotide
  modified_base 10: mod_base = OTHER; note = 2'-fluoro modified nucleotide
  modified_base 11: mod_base = OTHER; note = 2'-O-methyl modified nucleotide
  modified_base 12: mod_base = OTHER; note = 2'-fluoro modified nucleotide
  modified_base 13: mod_base = OTHER; note = 2'-O-methyl modified nucleotide
  modified_base 14: mod_base = OTHER; note = 2'-fluoro modified nucleotide with phosphorothioate linkage
  modified_base 15: mod_base = OTHER; note = 2'-O-methyl modified nucleotide with phosphorothioate linkage
  modified_base 16: mod_base = OTHER; note = 2'-fluoro modified nucleotide with phosphorothioate linkage
  modified_base 17: mod_base = OTHER; note = 2'-O-methyl modified nucleotide with phosphorothioate linkage
  modified_base 18: mod_base = OTHER; note = 2'-fluoro modified nucleotide with phosphorothioate linkage
  misc_difference 19: note = 2'-O-methyl modified nucleotide may be trivalent N-acetylgalactosamine modified
ncaagtactcttaaagcaa

SEQ ID NO: 1836 - RNA, 19 nt, synthetic construct
  source 1..19: mol_type = other RNA
  misc_difference 1: note = 2'-O-methyl modified nucleotide with phosphorothioate linkage may be 5' phosphate modified
  modified_base 2: mod_base = OTHER; note = 2'-fluoro modified nucleotide with phosphorothioate linkage
  modified_base 3: mod_base = OTHER; note = 2'-O-methyl modified nucleotide
  modified_base 4: mod_base = OTHER; note = 2'-fluoro modified nucleotide
  modified_base 5: mod_base = OTHER; note = 2'-O-methyl modified nucleotide
  modified_base 6: mod_base = OTHER; note = 2'-fluoro modified nucleotide
  modified_base 7: mod_base = OTHER; note = 2'-O-methyl modified nucleotide
  modified_base 8: mod_base = OTHER; note = 2'-fluoro modified nucleotide
  modified_base 9: mod_base = OTHER; note = 2'-O-methyl modified nucleotide
  modified_base 10: mod_base = OTHER; note = 2'-fluoro modified nucleotide
  modified_base 11: mod_base = OTHER; note = 2'-O-methyl modified nucleotide
  modified_base 12: mod_base = OTHER; note = 2'-fluoro modified nucleotide
  modified_base 13: mod_base = OTHER; note = 2'-O-methyl modified nucleotide
  modified_base 14: mod_base = OTHER; note = 2'-fluoro modified nucleotide with phosphorothioate linkage
  modified_base 15: mod_base = OTHER; note = 2'-O-methyl modified nucleotide with phosphorothioate linkage
  modified_base 16: mod_base = OTHER; note = 2'-fluoro modified nucleotide with phosphorothioate linkage
  modified_base 17: mod_base = OTHER; note = 2'-O-methyl modified nucleotide with phosphorothioate linkage
  modified_base 18: mod_base = OTHER; note = 2'-fluoro modified nucleotide with phosphorothioate linkage
  misc_difference 19: note = 2'-O-methyl modified nucleotide may be trivalent N-acetylgalactosamine modified
nccaatgatttcctgtttc

SEQ ID NO: 1837 - RNA, 19 nt, synthetic construct
  source 1..19: mol_type = other RNA
  misc_difference 1: note = 2'-O-methyl modified nucleotide with phosphorothioate linkage may be 5' phosphate modified
  modified_base 2: mod_base = OTHER; note = 2'-fluoro modified nucleotide with phosphorothioate linkage
  modified_base 3: mod_base = OTHER; note = 2'-O-methyl modified nucleotide
  modified_base 4: mod_base = OTHER; note = 2'-fluoro modified nucleotide
  modified_base 5: mod_base = OTHER; note = 2'-O-methyl modified nucleotide
  modified_base 6: mod_base = OTHER; note = 2'-fluoro modified nucleotide
  modified_base 7: mod_base = OTHER; note = 2'-O-methyl modified nucleotide
  modified_base 8: mod_base = OTHER; note = 2'-fluoro modified nucleotide
  modified_base 9: mod_base = OTHER; note = 2'-O-methyl modified nucleotide
  modified_base 10: mod_base = OTHER; note = 2'-fluoro modified nucleotide
  modified_base 11: mod_base = OTHER; note = 2'-O-methyl modified nucleotide
  modified_base 12: mod_base = OTHER; note = 2'-fluoro modified nucleotide
  modified_base 13: mod_base = OTHER; note = 2'-O-methyl modified nucleotide
  modified_base 14: mod_base = OTHER; note = 2'-fluoro modified nucleotide with phosphorothioate linkage
  modified_base 15: mod_base = OTHER; note = 2'-O-methyl modified nucleotide with phosphorothioate linkage
  modified_base 16: mod_base = OTHER; note = 2'-fluoro modified nucleotide with phosphorothioate linkage
  modified_base 17: mod_base = OTHER; note = 2'-O-methyl modified nucleotide with phosphorothioate linkage
  modified_base 18: mod_base = OTHER; note = 2'-fluoro modified nucleotide with phosphorothioate linkage
  misc_difference 19: note = 2'-O-methyl modified nucleotide may be trivalent N-acetylgalactosamine modified
natggtatattcatttcca

SEQ ID NO: 1838 - RNA, 19 nt, synthetic construct
  source 1..19: mol_type = other RNA
  misc_difference 1: note = 2'-O-methyl modified nucleotide with phosphorothioate linkage may be 5' phosphate modified
  modified_base 2: mod_base = OTHER; note = 2'-fluoro modified nucleotide with phosphorothioate linkage
  modified_base 3: mod_base = OTHER; note = 2'-O-methyl modified nucleotide
  modified_base 4: mod_base = OTHER; note = 2'-fluoro modified nucleotide
  modified_base 5: mod_base = OTHER; note = 2'-O-methyl modified nucleotide
  modified_base 6: mod_base = OTHER; note = 2'-fluoro modified nucleotide
  modified_base 7: mod_base = OTHER; note = 2'-O-methyl modified nucleotide
  modified_base 8: mod_base = OTHER; note = 2'-fluoro modified nucleotide
  modified_base 9: mod_base = OTHER; note = 2'-O-methyl modified nucleotide
  modified_base 10: mod_base = OTHER; note = 2'-fluoro modified nucleotide
  modified_base 11: mod_base = OTHER; note = 2'-O-methyl modified nucleotide
  modified_base 12: mod_base = OTHER; note = 2'-fluoro modified nucleotide
  modified_base 13: mod_base = OTHER; note = 2'-O-methyl modified nucleotide
  modified_base 14: mod_base = OTHER; note = 2'-fluoro modified nucleotide with phosphorothioate linkage
  modified_base 15: mod_base = OTHER; note = 2'-O-methyl modified nucleotide with phosphorothioate linkage
  modified_base 16: mod_base = OTHER; note = 2'-fluoro modified nucleotide with phosphorothioate linkage
  modified_base 17: mod_base = OTHER; note = 2'-O-methyl modified nucleotide with phosphorothioate linkage
  modified_base 18: mod_base = OTHER; note = 2'-fluoro modified nucleotide with phosphorothioate linkage
  misc_difference 19: note = 2'-O-methyl modified nucleotide may be trivalent N-acetylgalactosamine modified
naacaagatgaacttccca

SEQ ID NO: 1839 - RNA, 19 nt, synthetic construct
  source 1..19: mol_type = other RNA
  misc_difference 1: note = 2'-O-methyl modified nucleotide with phosphorothioate linkage may be 5' phosphate modified
  modified_base 2: mod_base = OTHER; note = 2'-fluoro modified nucleotide with phosphorothioate linkage
  modified_base 3: mod_base = OTHER; note = 2'-O-methyl modified nucleotide
  modified_base 4: mod_base = OTHER; note = 2'-fluoro modified nucleotide
  modified_base 5: mod_base = OTHER; note = 2'-O-methyl modified nucleotide
  modified_base 6: mod_base = OTHER; note = 2'-fluoro modified nucleotide
  modified_base 7: mod_base = OTHER; note = 2'-O-methyl modified nucleotide
  modified_base 8: mod_base = OTHER; note = 2'-fluoro modified nucleotide
  modified_base 9: mod_base = OTHER; note = 2'-O-methyl modified nucleotide
  modified_base 10: mod_base = OTHER; note = 2'-fluoro modified nucleotide
  modified_base 11: mod_base = OTHER; note = 2'-O-methyl modified nucleotide
  modified_base 12: mod_base = OTHER; note = 2'-fluoro modified nucleotide
  modified_base 13: mod_base = OTHER; note = 2'-O-methyl modified nucleotide
  modified_base 14: mod_base = OTHER; note = 2'-fluoro modified nucleotide with phosphorothioate linkage
  modified_base 15: mod_base = OTHER; note = 2'-O-methyl modified nucleotide with phosphorothioate linkage
  modified_base 16: mod_base = OTHER; note = 2'-fluoro modified nucleotide with phosphorothioate linkage
  modified_base 17: mod_base = OTHER; note = 2'-O-methyl modified nucleotide with phosphorothioate linkage
  modified_base 18: mod_base = OTHER; note = 2'-fluoro modified nucleotide with phosphorothioate linkage
  misc_difference 19: note = 2'-O-methyl modified nucleotide may be trivalent N-acetylgalactosamine modified
ngaacttcaggaattttag

SEQ ID NO: 1840 - RNA, 19 nt, synthetic construct
  source 1..19: mol_type = other RNA
  misc_difference 1: note = 2'-O-methyl modified nucleotide with phosphorothioate linkage may be 5' phosphate modified
  modified_base 2: mod_base = OTHER; note = 2'-fluoro modified nucleotide with phosphorothioate linkage
  modified_base 3: mod_base = OTHER; note = 2'-O-methyl modified nucleotide
  modified_base 4: mod_base = OTHER; note = 2'-fluoro modified nucleotide
  modified_base 5: mod_base = OTHER; note = 2'-O-methyl modified nucleotide
  modified_base 6: mod_base = OTHER; note = 2'-fluoro modified nucleotide
  modified_base 7: mod_base = OTHER; note = 2'-O-methyl modified nucleotide
  modified_base 8: mod_base = OTHER; note = 2'-fluoro modified nucleotide
  modified_base 9: mod_base = OTHER; note = 2'-O-methyl modified nucleotide
  modified_base 10: mod_base = OTHER; note = 2'-fluoro modified nucleotide
  modified_base 11: mod_base = OTHER; note = 2'-O-methyl modified nucleotide
  modified_base 12: mod_base = OTHER; note = 2'-fluoro modified nucleotide
  modified_base 13: mod_base = OTHER; note = 2'-O-methyl modified nucleotide
  modified_base 14: mod_base = OTHER; note = 2'-fluoro modified nucleotide with phosphorothioate linkage
  modified_base 15: mod_base = OTHER; note = 2'-O-methyl modified nucleotide with phosphorothioate linkage
  modified_base 16: mod_base = OTHER; note = 2'-fluoro modified nucleotide with phosphorothioate linkage
  modified_base 17: mod_base = OTHER; note = 2'-O-methyl modified nucleotide with phosphorothioate linkage
  modified_base 18: mod_base = OTHER; note = 2'-fluoro modified nucleotide with phosphorothioate linkage
  misc_difference 19: note = 2'-O-methyl modified nucleotide may be trivalent N-acetylgalactosamine modified
nagtcttctcttattccaa

SEQ ID NO: 1841 - RNA, 19 nt, synthetic construct
  source 1..19: mol_type = other RNA
  misc_difference 1: note = 2'-O-methyl modified nucleotide with phosphorothioate linkage may be 5' phosphate modified
  modified_base 2: mod_base = OTHER; note = 2'-fluoro modified nucleotide with phosphorothioate linkage
  modified_base 3: mod_base = OTHER; note = 2'-O-methyl modified nucleotide
  modified_base 4: mod_base = OTHER; note = 2'-fluoro modified nucleotide
  modified_base 5: mod_base = OTHER; note = 2'-O-methyl modified nucleotide
  modified_base 6: mod_base = OTHER; note = 2'-fluoro modified nucleotide
  modified_base 7: mod_base = OTHER; note = 2'-O-methyl modified nucleotide
  modified_base 8: mod_base = OTHER; note = 2'-fluoro modified nucleotide
  modified_base 9: mod_base = OTHER; note = 2'-O-methyl modified nucleotide
  modified_base 10: mod_base = OTHER; note = 2'-fluoro modified nucleotide
  modified_base 11: mod_base = OTHER; note = 2'-O-methyl modified nucleotide
  modified_base 12: mod_base = OTHER; note = 2'-fluoro modified nucleotide
  modified_base 13: mod_base = OTHER; note = 2'-O-methyl modified nucleotide
  modified_base 14: mod_base = OTHER; note = 2'-fluoro modified nucleotide with phosphorothioate linkage
  modified_base 15: mod_base = OTHER; note = 2'-O-methyl modified nucleotide with phosphorothioate linkage
  modified_base 16: mod_base = OTHER; note = 2'-fluoro modified nucleotide with phosphorothioate linkage
  modified_base 17: mod_base = OTHER; note = 2'-O-methyl modified nucleotide with phosphorothioate linkage
  modified_base 18: mod_base = OTHER; note = 2'-fluoro modified nucleotide with phosphorothioate linkage
  misc_difference 19: note = 2'-O-methyl modified nucleotide may be trivalent N-acetylgalactosamine modified
naatgtttatactttgata

SEQ ID NO: 1842 - RNA, 19 nt, synthetic construct
  source 1..19: mol_type = other RNA
  misc_difference 1: note = 2'-O-methyl modified nucleotide with phosphorothioate linkage may be 5' phosphate modified
  modified_base 2: mod_base = OTHER; note = 2'-fluoro modified nucleotide with phosphorothioate linkage
  modified_base 3: mod_base = OTHER; note = 2'-O-methyl modified nucleotide
  modified_base 4: mod_base = OTHER; note = 2'-fluoro modified nucleotide
  modified_base 5: mod_base = OTHER; note = 2'-O-methyl modified nucleotide
  modified_base 6: mod_base = OTHER; note = 2'-fluoro modified nucleotide
  modified_base 7: mod_base = OTHER; note = 2'-O-methyl modified nucleotide
  modified_base 8: mod_base = OTHER; note = 2'-fluoro modified nucleotide
  modified_base 9: mod_base = OTHER; note = 2'-O-methyl modified nucleotide
  modified_base 10: mod_base = OTHER; note = 2'-fluoro modified nucleotide
  modified_base 11: mod_base = OTHER; note = 2'-O-methyl modified nucleotide
  modified_base 12: mod_base = OTHER; note = 2'-fluoro modified nucleotide
  modified_base 13: mod_base = OTHER; note = 2'-O-methyl modified nucleotide
  modified_base 14: mod_base = OTHER; note = 2'-fluoro modified nucleotide with phosphorothioate linkage
  modified_base 15: mod_base = OTHER; note = 2'-O-methyl modified nucleotide with phosphorothioate linkage
  modified_base 16: mod_base = OTHER; note = 2'-fluoro modified nucleotide with phosphorothioate linkage
  modified_base 17: mod_base = OTHER; note = 2'-O-methyl modified nucleotide with phosphorothioate linkage
  modified_base 18: mod_base = OTHER; note = 2'-fluoro modified nucleotide with phosphorothioate linkage
  misc_difference 19: note = 2'-O-methyl modified nucleotide may be trivalent N-acetylgalactosamine modified
ncggaatcgtacacaaagg

SEQ ID NO: 1843 - RNA, 19 nt, synthetic construct
  source 1..19: mol_type = other RNA
  misc_difference 1: note = 2'-O-methyl modified nucleotide with phosphorothioate linkage may be 5' phosphate modified
  modified_base 2: mod_base = OTHER; note = 2'-fluoro modified nucleotide with phosphorothioate linkage
  modified_base 3: mod_base = OTHER; note = 2'-O-methyl modified nucleotide
  modified_base 4: mod_base = OTHER; note = 2'-fluoro modified nucleotide
  modified_base 5: mod_base = OTHER; note = 2'-O-methyl modified nucleotide
  modified_base 6: mod_base = OTHER; note = 2'-fluoro modified nucleotide
  modified_base 7: mod_base = OTHER; note = 2'-O-methyl modified nucleotide
  modified_base 8: mod_base = OTHER; note = 2'-fluoro modified nucleotide
  modified_base 9: mod_base = OTHER; note = 2'-O-methyl modified nucleotide
  modified_base 10: mod_base = OTHER; note = 2'-fluoro modified nucleotide
  modified_base 11: mod_base = OTHER; note = 2'-O-methyl modified nucleotide
  modified_base 12: mod_base = OTHER; note = 2'-fluoro modified nucleotide
  modified_base 13: mod_base = OTHER; note = 2'-O-methyl modified nucleotide
  modified_base 14: mod_base = OTHER; note = 2'-fluoro modified nucleotide with phosphorothioate linkage
  modified_base 15: mod_base = OTHER; note = 2'-O-methyl modified nucleotide with phosphorothioate linkage
  modified_base 16: mod_base = OTHER; note = 2'-fluoro modified nucleotide with phosphorothioate linkage
  modified_base 17: mod_base = OTHER; note = 2'-O-methyl modified nucleotide with phosphorothioate linkage
  modified_base 18: mod_base = OTHER; note = 2'-fluoro modified nucleotide with phosphorothioate linkage
  misc_difference 19: note = 2'-O-methyl modified nucleotide may be trivalent N-acetylgalactosamine modified
natacctctgctcttctga

SEQ ID NO: 1844 - RNA, 19 nt, synthetic construct
  source 1..19: mol_type = other RNA
  misc_difference 1: note = 2'-O-methyl modified nucleotide with phosphorothioate linkage may be 5' phosphate modified
  modified_base 2: mod_base = OTHER; note = 2'-fluoro modified nucleotide with phosphorothioate linkage
  modified_base 3: mod_base = OTHER; note = 2'-O-methyl modified nucleotide
  modified_base 4: mod_base = OTHER; note = 2'-fluoro modified nucleotide
  modified_base 5: mod_base = OTHER; note = 2'-O-methyl modified nucleotide
  modified_base 6: mod_base = OTHER; note = 2'-fluoro modified nucleotide
  modified_base 7: mod_base = OTHER; note = 2'-O-methyl modified nucleotide
  modified_base 8: mod_base = OTHER; note = 2'-fluoro modified nucleotide
  modified_base 9: mod_base = OTHER; note = 2'-O-methyl modified nucleotide
  modified_base 10: mod_base = OTHER; note = 2'-fluoro modified nucleotide
  modified_base 11: mod_base = OTHER; note = 2'-O-methyl modified nucleotide
  modified_base 12: mod_base = OTHER; note = 2'-fluoro modified nucleotide
  modified_base 13: mod_base = OTHER; note = 2'-O-methyl modified nucleotide
  modified_base 14: mod_base = OTHER; note = 2'-fluoro modified nucleotide with phosphorothioate linkage
  modified_base 15: mod_base = OTHER; note = 2'-O-methyl modified nucleotide with phosphorothioate linkage
  modified_base 16: mod_base = OTHER; note = 2'-fluoro modified nucleotide with phosphorothioate linkage
  modified_base 17: mod_base = OTHER; note = 2'-O-methyl modified nucleotide with phosphorothioate linkage
  modified_base 18: mod_base = OTHER; note = 2'-fluoro modified nucleotide with phosphorothioate linkage
  misc_difference 19: note = 2'-O-methyl modified nucleotide may be trivalent N-acetylgalactosamine modified
natcaatttcttctaccat

SEQ ID NO: 1845 - RNA, 19 nt, synthetic construct
  source 1..19: mol_type = other RNA
  misc_difference 1: note = 2'-O-methyl modified nucleotide with phosphorothioate linkage may be 5' phosphate modified
  modified_base 2: mod_base = OTHER; note = 2'-fluoro modified nucleotide with phosphorothioate linkage
  modified_base 3: mod_base = OTHER; note = 2'-O-methyl modified nucleotide
  modified_base 4: mod_base = OTHER; note = 2'-fluoro modified nucleotide
  modified_base 5: mod_base = OTHER; note = 2'-O-methyl modified nucleotide
  modified_base 6: mod_base = OTHER; note = 2'-fluoro modified nucleotide
  modified_base 7: mod_base = OTHER; note = 2'-O-methyl modified nucleotide
  modified_base 8: mod_base = OTHER; note = 2'-fluoro modified nucleotide
  modified_base 9: mod_base = OTHER; note = 2'-O-methyl modified nucleotide
  modified_base 10: mod_base = OTHER; note = 2'-fluoro modified nucleotide
  modified_base 11: mod_base = OTHER; note = 2'-O-methyl modified nucleotide
  modified_base 12: mod_base = OTHER; note = 2'-fluoro modified nucleotide
  modified_base 13: mod_base = OTHER; note = 2'-O-methyl modified nucleotide
  modified_base 14: mod_base = OTHER; note = 2'-fluoro modified nucleotide with phosphorothioate linkage
  modified_base 15: mod_base = OTHER; note = 2'-O-methyl modified nucleotide with phosphorothioate linkage
  modified_base 16: mod_base = OTHER; note = 2'-fluoro modified nucleotide with phosphorothioate linkage
  modified_base 17: mod_base = OTHER; note = 2'-O-methyl modified nucleotide with phosphorothioate linkage
  modified_base 18: mod_base = OTHER; note = 2'-fluoro modified nucleotide with phosphorothioate linkage
  misc_difference 19: note = 2'-O-methyl modified nucleotide may be trivalent N-acetylgalactosamine modified
naacattgtgttttgcatt

SEQ ID NO: 1846 - RNA, 19 nt, synthetic construct
  source 1..19: mol_type = other RNA
  misc_difference 1: note = 2'-O-methyl modified nucleotide with phosphorothioate linkage may be 5' phosphate modified
  modified_base 2: mod_base = OTHER; note = 2'-fluoro modified nucleotide with phosphorothioate linkage
  modified_base 3: mod_base = OTHER; note = 2'-O-methyl modified nucleotide
  modified_base 4: mod_base = OTHER; note = 2'-fluoro modified nucleotide
  modified_base 5: mod_base = OTHER; note = 2'-O-methyl modified nucleotide
  modified_base 6: mod_base = OTHER; note = 2'-fluoro modified nucleotide
  modified_base 7: mod_base = OTHER; note = 2'-O-methyl modified nucleotide
  modified_base 8: mod_base = OTHER; note = 2'-fluoro modified nucleotide
  modified_base 9: mod_base = OTHER; note = 2'-O-methyl modified nucleotide
  modified_base 10: mod_base = OTHER; note = 2'-fluoro modified nucleotide
  modified_base 11: mod_base = OTHER; note = 2'-O-methyl modified nucleotide
  modified_base 12: mod_base = OTHER; note = 2'-fluoro modified nucleotide
  modified_base 13: mod_base = OTHER; note = 2'-O-methyl modified nucleotide
  modified_base 14: mod_base = OTHER; note = 2'-fluoro modified nucleotide with phosphorothioate linkage
  modified_base 15: mod_base = OTHER; note = 2'-O-methyl modified nucleotide with phosphorothioate linkage
  modified_base 16: mod_base = OTHER; note = 2'-fluoro modified nucleotide with phosphorothioate linkage
  modified_base 17: mod_base = OTHER; note = 2'-O-methyl modified nucleotide with phosphorothioate linkage
  modified_base 18: mod_base = OTHER; note = 2'-fluoro modified nucleotide with phosphorothioate linkage
  misc_difference 19: note = 2'-O-methyl modified nucleotide may be trivalent N-acetylgalactosamine modified
naactttataagcatatgc

SEQ ID NO: 1847 - RNA, 19 nt, synthetic construct
  source 1..19: mol_type = other RNA
  misc_difference 1: note = 2'-O-methyl modified nucleotide with phosphorothioate linkage may be 5' phosphate modified
  modified_base 2: mod_base = OTHER; note = 2'-fluoro modified nucleotide with phosphorothioate linkage
  modified_base 3: mod_base = OTHER; note = 2'-O-methyl modified nucleotide
  modified_base 4: mod_base = OTHER; note = 2'-fluoro modified nucleotide
  modified_base 5: mod_base = OTHER; note = 2'-O-methyl modified nucleotide
  modified_base 6: mod_base = OTHER; note = 2'-fluoro modified nucleotide
  modified_base 7: mod_base = OTHER; note = 2'-O-methyl modified nucleotide
  modified_base 8: mod_base = OTHER; note = 2'-fluoro modified nucleotide
  modified_base 9: mod_base = OTHER; note = 2'-O-methyl modified nucleotide
  modified_base 10: mod_base = OTHER; note = 2'-fluoro modified nucleotide
  modified_base 11: mod_base = OTHER; note = 2'-O-methyl modified nucleotide
  modified_base 12: mod_base = OTHER; note = 2'-fluoro modified nucleotide
  modified_base 13: mod_base = OTHER; note = 2'-O-methyl modified nucleotide
  modified_base 14: mod_base = OTHER; note = 2'-fluoro modified nucleotide with phosphorothioate linkage
  modified_base 15: mod_base = OTHER; note = 2'-O-methyl modified nucleotide with phosphorothioate linkage
  modified_base 16: mod_base = OTHER; note = 2'-fluoro modified nucleotide with phosphorothioate linkage
  modified_base 17: mod_base = OTHER; note = 2'-O-methyl modified nucleotide with phosphorothioate linkage
  modified_base 18: mod_base = OTHER; note = 2'-fluoro modified nucleotide with phosphorothioate linkage
  misc_difference 19: note = 2'-O-methyl modified nucleotide may be trivalent N-acetylgalactosamine modified
naggataacttttaataga

SEQ ID NO: 1848 - RNA, 19 nt, synthetic construct
  source 1..19: mol_type = other RNA
  misc_difference 1: note = 2'-O-methyl modified nucleotide with phosphorothioate linkage may be 5' phosphate modified
  modified_base 2: mod_base = OTHER; note = 2'-fluoro modified nucleotide with phosphorothioate linkage
  modified_base 3: mod_base = OTHER; note = 2'-O-methyl modified nucleotide
  modified_base 4: mod_base = OTHER; note = 2'-fluoro modified nucleotide
  modified_base 5: mod_base = OTHER; note = 2'-O-methyl modified nucleotide
  modified_base 6: mod_base = OTHER; note = 2'-fluoro modified nucleotide
  modified_base 7: mod_base = OTHER; note = 2'-O-methyl modified nucleotide
  modified_base 8: mod_base = OTHER; note = 2'-fluoro modified nucleotide
  modified_base 9: mod_base = OTHER; note = 2'-O-methyl modified nucleotide
  modified_base 10: mod_base = OTHER; note = 2'-fluoro modified nucleotide
  modified_base 11: mod_base = OTHER; note = 2'-O-methyl modified nucleotide
  modified_base 12: mod_base = OTHER; note = 2'-fluoro modified nucleotide
  modified_base 13: mod_base = OTHER; note = 2'-O-methyl modified nucleotide
  modified_base 14: mod_base = OTHER; note = 2'-fluoro modified nucleotide with phosphorothioate linkage
  modified_base 15: mod_base = OTHER; note = 2'-O-methyl modified nucleotide with phosphorothioate linkage
  modified_base 16: mod_base = OTHER; note = 2'-fluoro modified nucleotide with phosphorothioate linkage
  modified_base 17: mod_base = OTHER; note = 2'-O-methyl modified nucleotide with phosphorothioate linkage
  modified_base 18: mod_base = OTHER; note = 2'-fluoro modified nucleotide with phosphorothioate linkage
  misc_difference 19: note = 2'-O-methyl modified nucleotide may be trivalent N-acetylgalactosamine modified
ntttattggttgatactgt

SEQ ID NO: 1849 - RNA, 19 nt, synthetic construct
  source 1..19: mol_type = other RNA
  misc_difference 1: note = 2'-O-methyl modified nucleotide with phosphorothioate linkage may be 5' phosphate modified
  modified_base 2: mod_base = OTHER; note = 2'-fluoro modified nucleotide with phosphorothioate linkage
  modified_base 3: mod_base = OTHER; note = 2'-O-methyl modified nucleotide
  modified_base 4: mod_base = OTHER; note = 2'-fluoro modified nucleotide
  modified_base 5: mod_base = OTHER; note = 2'-O-methyl modified nucleotide
  modified_base 6: mod_base = OTHER; note = 2'-fluoro modified nucleotide
  modified_base 7: mod_base = OTHER; note = 2'-O-methyl modified nucleotide
  modified_base 8: mod_base = OTHER; note = 2'-fluoro modified nucleotide
  modified_base 9: mod_base = OTHER; note = 2'-O-methyl modified nucleotide
  modified_base 10: mod_base = OTHER; note = 2'-fluoro modified nucleotide
  modified_base 11: mod_base = OTHER; note = 2'-O-methyl modified nucleotide
  modified_base 12: mod_base = OTHER; note = 2'-fluoro modified nucleotide
  modified_base 13: mod_base = OTHER; note = 2'-O-methyl modified nucleotide
  modified_base 14: mod_base = OTHER; note = 2'-fluoro modified nucleotide with phosphorothioate linkage
  modified_base 15: mod_base = OTHER; note = 2'-O-methyl modified nucleotide with phosphorothioate linkage
  modified_base 16: mod_base = OTHER; note = 2'-fluoro modified nucleotide with phosphorothioate linkage
  modified_base 17: mod_base = OTHER; note = 2'-O-methyl modified nucleotide with phosphorothioate linkage
  modified_base 18: mod_base = OTHER; note = 2'-fluoro modified nucleotide with phosphorothioate linkage
  misc_difference 19: note = 2'-O-methyl modified nucleotide may be trivalent N-acetylgalactosamine modified
ngcaactgttttcttctgg

SEQ ID NO: 1850 - RNA, 19 nt, synthetic construct
  source 1..19: mol_type = other RNA
  misc_difference 1: note = 2'-O-methyl modified nucleotide with phosphorothioate linkage may be 5' phosphate modified
  modified_base 2: mod_base = OTHER; note = 2'-fluoro modified nucleotide with phosphorothioate linkage
  modified_base 3: mod_base = OTHER; note = 2'-O-methyl modified nucleotide
  modified_base 4: mod_base = OTHER; note = 2'-fluoro modified nucleotide
  modified_base 5: mod_base = OTHER; note = 2'-O-methyl modified nucleotide
  modified_base 6: mod_base = OTHER; note = 2'-fluoro modified nucleotide
  modified_base 7: mod_base = OTHER; note = 2'-O-methyl modified nucleotide
  modified_base 8: mod_base = OTHER; note = 2'-fluoro modified nucleotide
  modified_base 9: mod_base = OTHER; note = 2'-O-methyl modified nucleotide
  modified_base 10: mod_base = OTHER; note = 2'-fluoro modified nucleotide
  modified_base 11: mod_base = OTHER; note = 2'-O-methyl modified nucleotide
  modified_base 12: mod_base = OTHER; note = 2'-fluoro modified nucleotide
  modified_base 13: mod_base = OTHER; note = 2'-O-methyl modified nucleotide
  modified_base 14: mod_base = OTHER; note = 2'-fluoro modified nucleotide with phosphorothioate linkage
  modified_base 15: mod_base = OTHER; note = 2'-O-methyl modified nucleotide with phosphorothioate linkage
  modified_base 16: mod_base = OTHER; note = 2'-fluoro modified nucleotide with phosphorothioate linkage
  modified_base 17: mod_base = OTHER; note = 2'-O-methyl modified nucleotide with phosphorothioate linkage
  modified_base 18: mod_base = OTHER; note = 2'-fluoro modified nucleotide with phosphorothioate linkage
  misc_difference 19: note = 2'-O-methyl modified nucleotide may be trivalent N-acetylgalactosamine modified
ngctttgatacaacttcca

SEQ ID NO: 1851 - RNA, 19 nt, synthetic construct
  source 1..19: mol_type = other RNA
  misc_difference 1: note = 2'-O-methyl modified nucleotide with phosphorothioate linkage may be 5' phosphate modified
  modified_base 2: mod_base = OTHER; note = 2'-fluoro modified nucleotide with phosphorothioate linkage
  modified_base 3: mod_base = OTHER; note = 2'-O-methyl modified nucleotide
  modified_base 4: mod_base = OTHER; note = 2'-fluoro modified nucleotide
  modified_base 5: mod_base = OTHER; note = 2'-O-methyl modified nucleotide
  modified_base 6: mod_base = OTHER; note = 2'-fluoro modified nucleotide
  modified_base 7: mod_base = OTHER; note = 2'-O-methyl modified nucleotide
  modified_base 8: mod_base = OTHER; note = 2'-fluoro modified nucleotide
  modified_base 9: mod_base = OTHER; note = 2'-O-methyl modified nucleotide
  modified_base 10: mod_base = OTHER; note = 2'-fluoro modified nucleotide
  modified_base 11: mod_base = OTHER; note = 2'-O-methyl modified nucleotide
  modified_base 12: mod_base = OTHER; note = 2'-fluoro modified nucleotide
  modified_base 13: mod_base = OTHER; note = 2'-O-methyl modified nucleotide
  modified_base 14: mod_base = OTHER; note = 2'-fluoro modified nucleotide with phosphorothioate linkage
  modified_base 15: mod_base = OTHER; note = 2'-O-methyl modified nucleotide with phosphorothioate linkage
  modified_base 16: mod_base = OTHER; note = 2'-fluoro modified nucleotide with phosphorothioate linkage
  modified_base 17: mod_base = OTHER; note = 2'-O-methyl modified nucleotide with phosphorothioate linkage
  modified_base 18: mod_base = OTHER; note = 2'-fluoro modified nucleotide with phosphorothioate linkage
  misc_difference 19: note = 2'-O-methyl modified nucleotide may be trivalent N-acetylgalactosamine modified
ncaaagcttctctcttcaa

SEQ ID NO: 1852 - RNA, 19 nt, synthetic construct
  source 1..19: mol_type = other RNA
  misc_difference 1: note = 2'-O-methyl modified nucleotide with phosphorothioate linkage may be 5' phosphate modified
  modified_base 2: mod_base = OTHER; note = 2'-fluoro modified nucleotide with phosphorothioate linkage
  modified_base 3: mod_base = OTHER; note = 2'-O-methyl modified nucleotide
  modified_base 4: mod_base = OTHER; note = 2'-fluoro modified nucleotide
  modified_base 5: mod_base = OTHER; note = 2'-O-methyl modified nucleotide
  modified_base 6: mod_base = OTHER; note = 2'-fluoro modified nucleotide
  modified_base 7: mod_base = OTHER; note = 2'-O-methyl modified nucleotide
  modified_base 8: mod_base = OTHER; note = 2'-fluoro modified nucleotide
  modified_base 9: mod_base = OTHER; note = 2'-O-methyl modified nucleotide
  modified_base 10: mod_base = OTHER; note = 2'-fluoro modified nucleotide
  modified_base 11: mod_base = OTHER; note = 2'-O-methyl modified nucleotide
  modified_base 12: mod_base = OTHER; note = 2'-fluoro modified nucleotide
  modified_base 13: mod_base = OTHER; note = 2'-O-methyl modified nucleotide
  modified_base 14: mod_base = OTHER; note = 2'-fluoro modified nucleotide with phosphorothioate linkage
  modified_base 15: mod_base = OTHER; note = 2'-O-methyl modified nucleotide with phosphorothioate linkage
  modified_base 16: mod_base = OTHER; note = 2'-fluoro modified nucleotide with phosphorothioate linkage
  modified_base 17: mod_base = OTHER; note = 2'-O-methyl modified nucleotide with phosphorothioate linkage
  modified_base 18: mod_base = OTHER; note = 2'-fluoro modified nucleotide with phosphorothioate linkage
  misc_difference 19: note = 2'-O-methyl modified nucleotide may be trivalent N-acetylgalactosamine modified
nggaactcctttcgtctgc

SEQ ID NO: 1853 - RNA, 19 nt, synthetic construct
  source 1..19: mol_type = other RNA
  misc_difference 1: note = 2'-O-methyl modified nucleotide with phosphorothioate linkage may be 5' phosphate modified
  modified_base 2: mod_base = OTHER; note = 2'-fluoro modified nucleotide with phosphorothioate linkage
  modified_base 3: mod_base = OTHER; note = 2'-O-methyl modified nucleotide
  modified_base 4: mod_base = OTHER; note = 2'-fluoro modified nucleotide
  modified_base 5: mod_base = OTHER; note = 2'-O-methyl modified nucleotide
  modified_base 6: mod_base = OTHER; note = 2'-fluoro modified nucleotide
  modified_base 7: mod_base = OTHER; note = 2'-O-methyl modified nucleotide
  modified_base 8: mod_base = OTHER; note = 2'-fluoro modified nucleotide
  modified_base 9: mod_base = OTHER; note = 2'-O-methyl modified nucleotide
  modified_base 10: mod_base = OTHER; note = 2'-fluoro modified nucleotide
  modified_base 11: mod_base = OTHER; note = 2'-O-methyl modified nucleotide
  modified_base 12: mod_base = OTHER; note = 2'-fluoro modified nucleotide
  modified_base 13: mod_base = OTHER; note = 2'-O-methyl modified nucleotide
  modified_base 14: mod_base = OTHER; note = 2'-fluoro modified nucleotide with phosphorothioate linkage
  modified_base 15: mod_base = OTHER; note = 2'-O-methyl modified nucleotide with phosphorothioate linkage
  modified_base 16: mod_base = OTHER; note = 2'-fluoro modified nucleotide with phosphorothioate linkage
  modified_base 17: mod_base = OTHER; note = 2'-O-methyl modified nucleotide with phosphorothioate linkage
  modified_base 18: mod_base = OTHER; note = 2'-fluoro modified nucleotide with phosphorothioate linkage
  misc_difference 19: note = 2'-O-methyl modified nucleotide may be trivalent N-acetylgalactosamine modified
natgacagttctttgactg

SEQ ID NO: 1854 - RNA, 19 nt, synthetic construct
  source 1..19: mol_type = other RNA
  misc_difference 1: note = 2'-O-methyl modified nucleotide with phosphorothioate linkage may be 5' phosphate modified
  modified_base 2: mod_base = OTHER; note = 2'-fluoro modified nucleotide with phosphorothioate linkage
  modified_base 3: mod_base = OTHER; note = 2'-O-methyl modified nucleotide
  modified_base 4: mod_base = OTHER; note = 2'-fluoro modified nucleotide
  modified_base 5: mod_base = OTHER; note = 2'-O-methyl modified nucleotide
  modified_base 6: mod_base = OTHER; note = 2'-fluoro modified nucleotide
  modified_base 7: mod_base = OTHER; note = 2'-O-methyl modified nucleotide
  modified_base 8: mod_base = OTHER; note = 2'-fluoro modified nucleotide
  modified_base 9: mod_base = OTHER; note = 2'-O-methyl modified nucleotide
  modified_base 10: mod_base = OTHER; note = 2'-fluoro modified nucleotide
  modified_base 11: mod_base = OTHER; note = 2'-O-methyl modified nucleotide
  modified_base 12: mod_base = OTHER; note = 2'-fluoro modified nucleotide
  modified_base 13: mod_base = OTHER; note = 2'-O-methyl modified nucleotide
  modified_base 14: mod_base = OTHER; note = 2'-fluoro modified nucleotide with phosphorothioate linkage
  modified_base 15: mod_base = OTHER; note = 2'-O-methyl modified nucleotide with phosphorothioate linkage
  modified_base 16: mod_base = OTHER; note = 2'-fluoro modified nucleotide with phosphorothioate linkage
  modified_base 17: mod_base = OTHER; note = 2'-O-methyl modified nucleotide with phosphorothioate linkage
  modified_base 18: mod_base = OTHER; note = 2'-fluoro modified nucleotide with phosphorothioate linkage
  misc_difference 19: note = 2'-O-methyl modified nucleotide may be trivalent N-acetylgalactosamine modified
ntgcagaataacatgtcca

SEQ ID NO: 1855 - RNA, 19 nt, synthetic construct
  source 1..19: mol_type = other RNA
  misc_difference 1: note = 2'-O-methyl modified nucleotide with phosphorothioate linkage may be 5' phosphate modified
  modified_base 2: mod_base = OTHER; note = 2'-fluoro modified nucleotide with phosphorothioate linkage
  modified_base 3: mod_base = OTHER; note = 2'-O-methyl modified nucleotide
  modified_base 4: mod_base = OTHER; note = 2'-fluoro modified nucleotide
  modified_base 5: mod_base = OTHER; note = 2'-O-methyl modified nucleotide
  modified_base 6: mod_base = OTHER; note = 2'-fluoro modified nucleotide
  modified_base 7: mod_base = OTHER; note = 2'-O-methyl modified nucleotide
  modified_base 8: mod_base = OTHER; note = 2'-fluoro modified nucleotide
  modified_base 9: mod_base = OTHER; note = 2'-O-methyl modified nucleotide
  modified_base 10: mod_base = OTHER; note = 2'-fluoro modified nucleotide
  modified_base 11: mod_base = OTHER; note = 2'-O-methyl modified nucleotide
  modified_base 12: mod_base = OTHER; note = 2'-fluoro modified nucleotide
  modified_base 13: mod_base = OTHER; note = 2'-O-methyl modified nucleotide
  modified_base 14: mod_base = OTHER; note = 2'-fluoro modified nucleotide with phosphorothioate linkage
  modified_base 15: mod_base = OTHER; note = 2'-O-methyl modified nucleotide with phosphorothioate linkage
  modified_base 16: mod_base = OTHER; note = 2'-fluoro modified nucleotide with phosphorothioate linkage
  modified_base 17: mod_base = OTHER; note = 2'-O-methyl modified nucleotide with phosphorothioate linkage
  modified_base 18: mod_base = OTHER; note = 2'-fluoro modified nucleotide with phosphorothioate linkage
  misc_difference 19: note = 2'-O-methyl modified nucleotide may be trivalent N-acetylgalactosamine modified
nagaagtcctatagttgta

SEQ ID NO: 1856 - RNA, 19 nt, synthetic construct
  source 1..19: mol_type = other RNA
  misc_difference 1: note = 2'-O-methyl modified nucleotide with phosphorothioate linkage may be 5' phosphate modified
  modified_base 2: mod_base = OTHER; note = 2'-fluoro modified nucleotide with phosphorothioate linkage
  modified_base 3: mod_base = OTHER; note = 2'-O-methyl modified nucleotide
  modified_base 4: mod_base = OTHER; note = 2'-fluoro modified nucleotide
  modified_base 5: mod_base = OTHER; note = 2'-O-methyl modified nucleotide
  modified_base 6: mod_base = OTHER; note = 2'-fluoro modified nucleotide
  modified_base 7: mod_base = OTHER; note = 2'-O-methyl modified nucleotide
  modified_base 8: mod_base = OTHER; note = 2'-fluoro modified nucleotide
  modified_base 9: mod_base = OTHER; note = 2'-O-methyl modified nucleotide
  modified_base 10: mod_base = OTHER; note = 2'-fluoro modified nucleotide
  modified_base 11: mod_base = OTHER; note = 2'-O-methyl modified nucleotide
  modified_base 12: mod_base = OTHER; note = 2'-fluoro modified nucleotide
  modified_base 13: mod_base = OTHER; note = 2'-O-methyl modified nucleotide
  modified_base 14: mod_base = OTHER; note = 2'-fluoro modified nucleotide with phosphorothioate linkage
  modified_base 15: mod_base = OTHER; note = 2'-O-methyl modified nucleotide with phosphorothioate linkage
  modified_base 16: mod_base = OTHER; note = 2'-fluoro modified nucleotide with phosphorothioate linkage
  modified_base 17: mod_base = OTHER; note = 2'-O-methyl modified nucleotide with phosphorothioate linkage
  modified_base 18: mod_base = OTHER; note = 2'-fluoro modified nucleotide with phosphorothioate linkage
  misc_difference 19: note = 2'-O-methyl modified nucleotide may be trivalent N-acetylgalactosamine modified
nataacttttaatagagat

SEQ ID NO: 1857 - RNA, 19 nt, synthetic construct
  source 1..19: mol_type = other RNA
  misc_difference 1: note = 2'-O-methyl modified nucleotide with phosphorothioate linkage may be 5' phosphate modified
  modified_base 2: mod_base = OTHER; note = 2'-fluoro modified nucleotide with phosphorothioate linkage
  modified_base 3: mod_base = OTHER; note = 2'-O-methyl modified nucleotide
  modified_base 4: mod_base = OTHER; note = 2'-fluoro modified nucleotide
  modified_base 5: mod_base = OTHER; note = 2'-O-methyl modified nucleotide
  modified_base 6: mod_base = OTHER; note = 2'-fluoro modified nucleotide
  modified_base 7: mod_base = OTHER; note = 2'-O-methyl modified nucleotide
  modified_base 8: mod_base = OTHER; note = 2'-fluoro modified nucleotide
  modified_base 9: mod_base = OTHER; note = 2'-O-methyl modified nucleotide
  modified_base 10: mod_base = OTHER; note = 2'-fluoro modified nucleotide
  modified_base 11: mod_base = OTHER; note = 2'-O-methyl modified nucleotide
  modified_base 12: mod_base = OTHER; note = 2'-fluoro modified nucleotide
  modified_base 13: mod_base = OTHER; note = 2'-O-methyl modified nucleotide
  modified_base 14: mod_base = OTHER; note = 2'-fluoro modified nucleotide with phosphorothioate linkage
  modified_base 15: mod_base = OTHER; note = 2'-O-methyl modified nucleotide with phosphorothioate linkage
  modified_base 16: mod_base = OTHER; note = 2'-fluoro modified nucleotide with phosphorothioate linkage
  modified_base 17: mod_base = OTHER; note = 2'-O-methyl modified nucleotide with phosphorothioate linkage
  modified_base 18: mod_base = OTHER; note = 2'-fluoro modified nucleotide with phosphorothioate linkage
  misc_difference 19: note = 2'-O-methyl modified nucleotide may be trivalent N-acetylgalactosamine modified
nctaagatttcttttccaa

SEQ ID NO: 1858 - RNA, 19 nt, synthetic construct
  source 1..19: mol_type = other RNA
  misc_difference 1: note = 2'-O-methyl modified nucleotide with phosphorothioate linkage may be 5' phosphate modified
  modified_base 2: mod_base = OTHER; note = 2'-fluoro modified nucleotide with phosphorothioate linkage
  modified_base 3: mod_base = OTHER; note = 2'-O-methyl modified nucleotide
  modified_base 4: mod_base = OTHER; note = 2'-fluoro modified nucleotide
  modified_base 5: mod_base = OTHER; note = 2'-O-methyl modified nucleotide
  modified_base 6: mod_base = OTHER; note = 2'-fluoro modified nucleotide
  modified_base 7: mod_base = OTHER; note = 2'-O-methyl modified nucleotide
  modified_base 8: mod_base = OTHER; note = 2'-fluoro modified nucleotide
  modified_base 9: mod_base = OTHER; note = 2'-O-methyl modified nucleotide
  modified_base 10: mod_base = OTHER; note = 2'-fluoro modified nucleotide
  modified_base 11: mod_base = OTHER; note = 2'-O-methyl modified nucleotide
  modified_base 12: mod_base = OTHER; note = 2'-fluoro modified nucleotide
  modified_base 13: mod_base = OTHER; note = 2'-O-methyl modified nucleotide
  modified_base 14: mod_base = OTHER; note = 2'-fluoro modified nucleotide with phosphorothioate linkage
  modified_base 15: mod_base = OTHER; note = 2'-O-methyl modified nucleotide with phosphorothioate linkage
  modified_base 16: mod_base = OTHER; note = 2'-fluoro modified nucleotide with phosphorothioate linkage
  modified_base 17: mod_base = OTHER; note = 2'-O-methyl modified nucleotide with phosphorothioate linkage
  modified_base 18: mod_base = OTHER; note = 2'-fluoro modified nucleotide with phosphorothioate linkage
  misc_difference 19: note = 2'-O-methyl modified nucleotide may be trivalent N-acetylgalactosamine modified
nataaatgaacatggcctg

SEQ ID NO: 1859 - RNA, 15 nt, synthetic construct
  source 1..15: mol_type = other RNA
  modified_base 1: mod_base = OTHER; note = 2'-fluoro modified nucleotide with phosphorothioate linkage
  modified_base 2: mod_base = OTHER; note = 2'-O-methyl modified nucleotide with phosphorothioate linkage
  modified_base 3: mod_base = OTHER; note = 2'-fluoro modified nucleotide
  modified_base 4: mod_base = OTHER; note = 2'-O-methyl modified nucleotide
  modified_base 5: mod_base = OTHER; note = 2'-fluoro modified nucleotide
  modified_base 6: mod_base = OTHER; note = 2'-O-methyl modified nucleotide
  modified_base 7: mod_base = OTHER; note = 2'-fluoro modified nucleotide
  modified_base 8: mod_base = OTHER; note = 2'-O-methyl modified nucleotide
  modified_base 9: mod_base = OTHER; note = 2'-fluoro modified nucleotide
  modified_base 10: mod_base = OTHER; note = 2'-O-methyl modified nucleotide
  modified_base 11: mod_base = OTHER; note = 2'-fluoro modified nucleotide
  modified_base 12: mod_base = OTHER; note = 2'-O-methyl modified nucleotide
  modified_base 13: mod_base = OTHER; note = 2'-fluoro modified nucleotide with phosphorothioate linkage
  modified_base 14: mod_base = OTHER; note = 2'-O-methyl modified nucleotide with phosphorothioate linkage
  modified_base 15: mod_base = OTHER; note = 2'-fluoro trivalent N-acetylgalactosamine modified nucleotide
caggccaaactgtga

SEQ ID NO: 1860 - RNA, 15 nt, synthetic construct
  source 1..15: mol_type = other RNA
  modified_base 1: mod_base = OTHER; note = 2'-fluoro modified nucleotide with phosphorothioate linkage
  modified_base 2: mod_base = OTHER; note = 2'-O-methyl modified nucleotide with phosphorothioate linkage
  modified_base 3: mod_base = OTHER; note = 2'-fluoro modified nucleotide
  modified_base 4: mod_base = OTHER; note = 2'-O-methyl modified nucleotide
  modified_base 5: mod_base = OTHER; note = 2'-fluoro modified nucleotide
  modified_base 6: mod_base = OTHER; note = 2'-O-methyl modified nucleotide
  modified_base 7: mod_base = OTHER; note = 2'-fluoro modified nucleotide
  modified_base 8: mod_base = OTHER; note = 2'-O-methyl modified nucleotide
  modified_base 9: mod_base = OTHER; note = 2'-fluoro modified nucleotide
  modified_base 10: mod_base = OTHER; note = 2'-O-methyl modified nucleotide
  modified_base 11: mod_base = OTHER; note = 2'-fluoro modified nucleotide
  modified_base 12: mod_base = OTHER; note = 2'-O-methyl modified nucleotide
  modified_base 13: mod_base = OTHER; note = 2'-fluoro modified nucleotide with phosphorothioate linkage
  modified_base 14: mod_base = OTHER; note = 2'-O-methyl modified nucleotide with phosphorothioate linkage
  modified_base 15: mod_base = OTHER; note = 2'-fluoro trivalent N-acetylgalactosamine modified nucleotide
tgacttcaagattca

SEQ ID NO: 1861 - RNA, 15 nt, synthetic construct
  source 1..15: mol_type = other RNA
  modified_base 1: mod_base = OTHER; note = 2'-fluoro modified nucleotide with phosphorothioate linkage
  modified_base 2: mod_base = OTHER; note = 2'-O-methyl modified nucleotide with phosphorothioate linkage
  modified_base 3: mod_base = OTHER; note = 2'-fluoro modified nucleotide
  modified_base 4: mod_base = OTHER; note = 2'-O-methyl modified nucleotide
  modified_base 5: mod_base = OTHER; note = 2'-fluoro modified nucleotide
  modified_base 6: mod_base = OTHER; note = 2'-O-methyl modified nucleotide
  modified_base 7: mod_base = OTHER; note = 2'-fluoro modified nucleotide
  modified_base 8: mod_base = OTHER; note = 2'-O-methyl modified nucleotide
  modified_base 9: mod_base = OTHER; note = 2'-fluoro modified nucleotide
  modified_base 10: mod_base = OTHER; note = 2'-O-methyl modified nucleotide
  modified_base 11: mod_base = OTHER; note = 2'-fluoro modified nucleotide
  modified_base 12: mod_base = OTHER; note = 2'-O-methyl modified nucleotide
  modified_base 13: mod_base = OTHER; note = 2'-fluoro modified nucleotide with phosphorothioate linkage
  modified_base 14: mod_base = OTHER; note = 2'-O-methyl modified nucleotide with phosphorothioate linkage
  modified_base 15: mod_base = OTHER; note = 2'-fluoro trivalent N-acetylgalactosamine modified nucleotide
cagctacaagcccaa

SEQ ID NO: 1862 - RNA, 15 nt, synthetic construct
  source 1..15: mol_type = other RNA
  modified_base 1: mod_base = OTHER; note = 2'-fluoro modified nucleotide with phosphorothioate linkage
  modified_base 2: mod_base = OTHER; note = 2'-O-methyl modified nucleotide with phosphorothioate linkage
  modified_base 3: mod_base = OTHER; note = 2'-fluoro modified nucleotide
  modified_base 4: mod_base = OTHER; note = 2'-O-methyl modified nucleotide
  modified_base 5: mod_base = OTHER; note = 2'-fluoro modified nucleotide
  modified_base 6: mod_base = OTHER; note = 2'-O-methyl modified nucleotide
  modified_base 7: mod_base = OTHER; note = 2'-fluoro modified nucleotide
  modified_base 8: mod_base = OTHER; note = 2'-O-methyl modified nucleotide
  modified_base 9: mod_base = OTHER; note = 2'-fluoro modified nucleotide
  modified_base 10: mod_base = OTHER; note = 2'-O-methyl modified nucleotide
  modified_base 11: mod_base = OTHER; note = 2'-fluoro modified nucleotide
  modified_base 12: mod_base = OTHER; note = 2'-O-methyl modified nucleotide
  modified_base 13: mod_base = OTHER; note = 2'-fluoro modified nucleotide with phosphorothioate linkage
  modified_base 14: mod_base = OTHER; note = 2'-O-methyl modified nucleotide with phosphorothioate linkage
  modified_base 15: mod_base = OTHER; note = 2'-fluoro trivalent N-acetylgalactosamine modified nucleotide
actataattacttga

SEQ ID NO: 1863 - RNA, 15 nt, synthetic construct
  source 1..15: mol_type = other RNA
  modified_base 1: mod_base = OTHER; note = 2'-fluoro modified nucleotide with phosphorothioate linkage
  modified_base 2: mod_base = OTHER; note = 2'-O-methyl modified nucleotide with phosphorothioate linkage
  modified_base 3: mod_base = OTHER; note = 2'-fluoro modified nucleotide
  modified_base 4: mod_base = OTHER; note = 2'-O-methyl modified nucleotide
  modified_base 5: mod_base = OTHER; note = 2'-fluoro modified nucleotide
  modified_base 6: mod_base = OTHER; note = 2'-O-methyl modified nucleotide
  modified_base 7: mod_base = OTHER; note = 2'-fluoro modified nucleotide
  modified_base 8: mod_base = OTHER; note = 2'-O-methyl modified nucleotide
  modified_base 9: mod_base = OTHER; note = 2'-fluoro modified nucleotide
  modified_base 10: mod_base = OTHER; note = 2'-O-methyl modified nucleotide
  modified_base 11: mod_base = OTHER; note = 2'-fluoro modified nucleotide
  modified_base 12: mod_base = OTHER; note = 2'-O-methyl modified nucleotide
  modified_base 13: mod_base = OTHER; note = 2'-fluoro modified nucleotide with phosphorothioate linkage
  modified_base 14: mod_base = OTHER; note = 2'-O-methyl modified nucleotide with phosphorothioate linkage
  modified_base 15: mod_base = OTHER; note = 2'-fluoro trivalent N-acetylgalactosamine modified nucleotide
cagacaaacctgtta

SEQ ID NO: 1864 - RNA, 15 nt, synthetic construct
  source 1..15: mol_type = other RNA
  modified_base 1: mod_base = OTHER; note = 2'-fluoro modified nucleotide with phosphorothioate linkage
  modified_base 2: mod_base = OTHER; note = 2'-O-methyl modified nucleotide with phosphorothioate linkage
  modified_base 3: mod_base = OTHER; note = 2'-fluoro modified nucleotide
  modified_base 4: mod_base = OTHER; note = 2'-O-methyl modified nucleotide
  modified_base 5: mod_base = OTHER; note = 2'-fluoro modified nucleotide
  modified_base 6: mod_base = OTHER; note = 2'-O-methyl modified nucleotide
  modified_base 7: mod_base = OTHER; note = 2'-fluoro modified nucleotide
  modified_base 8: mod_base = OTHER; note = 2'-O-methyl modified nucleotide
  modified_base 9: mod_base = OTHER; note = 2'-fluoro modified nucleotide
  modified_base 10: mod_base = OTHER; note = 2'-O-methyl modified nucleotide
  modified_base 11: mod_base = OTHER; note = 2'-fluoro modified nucleotide
  modified_base 12: mod_base = OTHER; note = 2'-O-methyl modified nucleotide
  modified_base 13: mod_base = OTHER; note = 2'-fluoro modified nucleotide with phosphorothioate linkage
  modified_base 14: mod_base = OTHER; note = 2'-O-methyl modified nucleotide with phosphorothioate linkage
  modified_base 15: mod_base = OTHER; note = 2'-fluoro trivalent N-acetylgalactosamine modified nucleotide
tgttaaaatgtctga

SEQ ID NO: 1865 - RNA, 15 nt, synthetic construct
  source 1..15: mol_type = other RNA
  modified_base 1: mod_base = OTHER; note = 2'-fluoro modified nucleotide with phosphorothioate linkage
  modified_base 2: mod_base = OTHER; note = 2'-O-methyl modified nucleotide with phosphorothioate linkage
  modified_base 3: mod_base = OTHER; note = 2'-fluoro modified nucleotide
  modified_base 4: mod_base = OTHER; note = 2'-O-methyl modified nucleotide
  modified_base 5: mod_base = OTHER; note = 2'-fluoro modified nucleotide
  modified_base 6: mod_base = OTHER; note = 2'-O-methyl modified nucleotide
  modified_base 7: mod_base = OTHER; note = 2'-fluoro modified nucleotide
  modified_base 8: mod_base = OTHER; note = 2'-O-methyl modified nucleotide
  modified_base 9: mod_base = OTHER; note = 2'-fluoro modified nucleotide
  modified_base 10: mod_base = OTHER; note = 2'-O-methyl modified nucleotide
  modified_base 11: mod_base = OTHER; note = 2'-fluoro modified nucleotide
  modified_base 12: mod_base = OTHER; note = 2'-O-methyl modified nucleotide
  modified_base 13: mod_base = OTHER; note = 2'-fluoro modified nucleotide with phosphorothioate linkage
  modified_base 14: mod_base = OTHER; note = 2'-O-methyl modified nucleotide with phosphorothioate linkage
  modified_base 15: mod_base = OTHER; note = 2'-fluoro trivalent N-acetylgalactosamine modified nucleotide
caaccagctccagga

SEQ ID NO: 1866 - RNA, 15 nt, synthetic construct
  source 1..15: mol_type = other RNA
  modified_base 1: mod_base = OTHER; note = 2'-fluoro modified nucleotide with phosphorothioate linkage
  modified_base 2: mod_base = OTHER; note = 2'-O-methyl modified nucleotide with phosphorothioate linkage
  modified_base 3: mod_base = OTHER; note = 2'-fluoro modified nucleotide
  modified_base 4: mod_base = OTHER; note = 2'-O-methyl modified nucleotide
  modified_base 5: mod_base = OTHER; note = 2'-fluoro modified nucleotide
  modified_base 6: mod_base = OTHER; note = 2'-O-methyl modified nucleotide
  modified_base 7: mod_base = OTHER; note = 2'-fluoro modified nucleotide
  modified_base 8: mod_base = OTHER; note = 2'-O-methyl modified nucleotide
  modified_base 9: mod_base = OTHER; note = 2'-fluoro modified nucleotide
  modified_base 10: mod_base = OTHER; note = 2'-O-methyl modified nucleotide
  modified_base 11: mod_base = OTHER; note = 2'-fluoro modified nucleotide
  modified_base 12: mod_base = OTHER; note = 2'-O-methyl modified nucleotide
  modified_base 13: mod_base = OTHER; note = 2'-fluoro modified nucleotide with phosphorothioate linkage
  modified_base 14: mod_base = OTHER; note = 2'-O-methyl modified nucleotide with phosphorothioate linkage
  modified_base 15: mod_base = OTHER; note = 2'-fluoro trivalent N-acetylgalactosamine modified nucleotide
ttacttgattttata

SEQ ID NO: 1867 - RNA, 15 nt, synthetic construct
  source 1..15: mol_type = other RNA
  modified_base 1: mod_base = OTHER; note = 2'-fluoro modified nucleotide with phosphorothioate linkage
  modified_base 2: mod_base = OTHER; note = 2'-O-methyl modified nucleotide with phosphorothioate linkage
  modified_base 3: mod_base = OTHER; note = 2'-fluoro modified nucleotide
  modified_base 4: mod_base = OTHER; note = 2'-O-methyl modified nucleotide
  modified_base 5: mod_base = OTHER; note = 2'-fluoro modified nucleotide
  modified_base 6: mod_base = OTHER; note = 2'-O-methyl modified nucleotide
  modified_base 7: mod_base = OTHER; note = 2'-fluoro modified nucleotide
  modified_base 8: mod_base = OTHER; note = 2'-O-methyl modified nucleotide
  modified_base 9: mod_base = OTHER; note = 2'-fluoro modified nucleotide
  modified_base 10: mod_base = OTHER; note = 2'-O-methyl modified nucleotide
  modified_base 11: mod_base = OTHER; note = 2'-fluoro modified nucleotide
  modified_base 12: mod_base = OTHER; note = 2'-O-methyl modified nucleotide
  modified_base 13: mod_base = OTHER; note = 2'-fluoro modified nucleotide with phosphorothioate linkage
  modified_base 14: mod_base = OTHER; note = 2'-O-methyl modified nucleotide with phosphorothioate linkage
  modified_base 15: mod_base = OTHER; note = 2'-fluoro trivalent N-acetylgalactosamine modified nucleotide
aggccaaactgtgta

SEQ ID NO: 1868 - RNA, 15 nt, synthetic construct
  source 1..15: mol_type = other RNA
  modified_base 1: mod_base = OTHER; note = 2'-fluoro modified nucleotide with phosphorothioate linkage
  modified_base 2: mod_base = OTHER; note = 2'-O-methyl modified nucleotide with phosphorothioate linkage
  modified_base 3: mod_base = OTHER; note = 2'-fluoro modified nucleotide
  modified_base 4: mod_base = OTHER; note = 2'-O-methyl modified nucleotide
  modified_base 5: mod_base = OTHER; note = 2'-fluoro modified nucleotide
  modified_base 6: mod_base = OTHER; note = 2'-O-methyl modified nucleotide
  modified_base 7: mod_base = OTHER; note = 2'-fluoro modified nucleotide
  modified_base 8: mod_base = OTHER; note = 2'-O-methyl modified nucleotide
  modified_base 9: mod_base = OTHER; note = 2'-fluoro modified nucleotide
  modified_base 10: mod_base = OTHER; note = 2'-O-methyl modified nucleotide
  modified_base 11: mod_base = OTHER; note = 2'-fluoro modified nucleotide
  modified_base 12: mod_base = OTHER; note = 2'-O-methyl modified nucleotide
  modified_base 13: mod_base = OTHER; note = 2'-fluoro modified nucleotide with phosphorothioate linkage
  modified_base 14: mod_base = OTHER; note = 2'-O-methyl modified nucleotide with phosphorothioate linkage
  modified_base 15: mod_base = OTHER; note = 2'-fluoro trivalent N-acetylgalactosamine modified nucleotide
gacttcaagattcca

SEQ ID NO: 1869 - RNA, 15 nt, synthetic construct
  source 1..15: mol_type = other RNA
  modified_base 1: mod_base = OTHER; note = 2'-fluoro modified nucleotide with phosphorothioate linkage
  modified_base 2: mod_base = OTHER; note = 2'-O-methyl modified nucleotide with phosphorothioate linkage
  modified_base 3: mod_base = OTHER; note = 2'-fluoro modified nucleotide
  modified_base 4: mod_base = OTHER; note = 2'-O-methyl modified nucleotide
  modified_base 5: mod_base = OTHER; note = 2'-fluoro modified nucleotide
  modified_base 6: mod_base = OTHER; note = 2'-O-methyl modified nucleotide
  modified_base 7: mod_base = OTHER; note = 2'-fluoro modified nucleotide
  modified_base 8: mod_base = OTHER; note = 2'-O-methyl modified nucleotide
  modified_base 9: mod_base = OTHER; note = 2'-fluoro modified nucleotide
  modified_base 10: mod_base = OTHER; note = 2'-O-methyl modified nucleotide
  modified_base 11: mod_base = OTHER; note = 2'-fluoro modified nucleotide
  modified_base 12: mod_base = OTHER; note = 2'-O-methyl modified nucleotide
  modified_base 13: mod_base = OTHER; note = 2'-fluoro modified nucleotide with phosphorothioate linkage
  modified_base 14: mod_base = OTHER; note = 2'-O-methyl modified nucleotide with phosphorothioate linkage
  modified_base 15: mod_base = OTHER; note = 2'-fluoro trivalent N-acetylgalactosamine modified nucleotide
tgtgttaaaatgtca

SEQ ID NO: 1870 - RNA, 15 nt, synthetic construct
  source 1..15: mol_type = other RNA
  modified_base 1: mod_base = OTHER; note = 2'-fluoro modified nucleotide with phosphorothioate linkage
  modified_base 2: mod_base = OTHER; note = 2'-O-methyl modified nucleotide with phosphorothioate linkage
  modified_base 3: mod_base = OTHER; note = 2'-fluoro modified nucleotide
  modified_base 4: mod_base = OTHER; note = 2'-O-methyl modified nucleotide
  modified_base 5: mod_base = OTHER; note = 2'-fluoro modified nucleotide
  modified_base 6: mod_base = OTHER; note = 2'-O-methyl modified nucleotide
  modified_base 7: mod_base = OTHER; note = 2'-fluoro modified nucleotide
  modified_base 8: mod_base = OTHER; note = 2'-O-methyl modified nucleotide
  modified_base 9: mod_base = OTHER; note = 2'-fluoro modified nucleotide
  modified_base 10: mod_base = OTHER; note = 2'-O-methyl modified nucleotide
  modified_base 11: mod_base = OTHER; note = 2'-fluoro modified nucleotide
  modified_base 12: mod_base = OTHER; note = 2'-O-methyl modified nucleotide
  modified_base 13: mod_base = OTHER; note = 2'-fluoro modified nucleotide with phosphorothioate linkage
  modified_base 14: mod_base = OTHER; note = 2'-O-methyl modified nucleotide with phosphorothioate linkage
  modified_base 15: mod_base = OTHER; note = 2'-fluoro trivalent N-acetylgalactosamine modified nucleotide
cttttcctgacttca

SEQ ID NO: 1871 - RNA, 15 nt, synthetic construct
  source 1..15: mol_type = other RNA
  modified_base 1: mod_base = OTHER; note = 2'-fluoro modified nucleotide with phosphorothioate linkage
  modified_base 2: mod_base = OTHER; note = 2'-O-methyl modified nucleotide with phosphorothioate linkage
  modified_base 3: mod_base = OTHER; note = 2'-fluoro modified nucleotide
  modified_base 4: mod_base = OTHER; note = 2'-O-methyl modified nucleotide
  modified_base 5: mod_base = OTHER; note = 2'-fluoro modified nucleotide
  modified_base 6: mod_base = OTHER; note = 2'-O-methyl modified nucleotide
  modified_base 7: mod_base = OTHER; note = 2'-fluoro modified nucleotide
  modified_base 8: mod_base = OTHER; note = 2'-O-methyl modified nucleotide
  modified_base 9: mod_base = OTHER; note = 2'-fluoro modified nucleotide
  modified_base 10: mod_base = OTHER; note = 2'-O-methyl modified nucleotide
  modified_base 11: mod_base = OTHER; note = 2'-fluoro modified nucleotide
  modified_base 12: mod_base = OTHER; note = 2'-O-methyl modified nucleotide
  modified_base 13: mod_base = OTHER; note = 2'-fluoro modified nucleotide with phosphorothioate linkage
  modified_base 14: mod_base = OTHER; note = 2'-O-methyl modified nucleotide with phosphorothioate linkage
  modified_base 15: mod_base = OTHER; note = 2'-fluoro trivalent N-acetylgalactosamine modified nucleotide
ccaggccaaactgta

SEQ ID NO: 1872 - RNA, 15 nt, synthetic construct
  source 1..15: mol_type = other RNA
  modified_base 1: mod_base = OTHER; note = 2'-fluoro modified nucleotide with phosphorothioate linkage
  modified_base 2: mod_base = OTHER; note = 2'-O-methyl modified nucleotide with phosphorothioate linkage
  modified_base 3: mod_base = OTHER; note = 2'-fluoro modified nucleotide
  modified_base 4: mod_base = OTHER; note = 2'-O-methyl modified nucleotide
  modified_base 5: mod_base = OTHER; note = 2'-fluoro modified nucleotide
  modified_base 6: mod_base = OTHER; note = 2'-O-methyl modified nucleotide
  modified_base 7: mod_base = OTHER; note = 2'-fluoro modified nucleotide
  modified_base 8: mod_base = OTHER; note = 2'-O-methyl modified nucleotide
  modified_base 9: mod_base = OTHER; note = 2'-fluoro modified nucleotide
  modified_base 10: mod_base = OTHER; note = 2'-O-methyl modified nucleotide
  modified_base 11: mod_base = OTHER; note = 2'-fluoro modified nucleotide
  modified_base 12: mod_base = OTHER; note = 2'-O-methyl modified nucleotide
  modified_base 13: mod_base = OTHER; note = 2'-fluoro modified nucleotide with phosphorothioate linkage
  modified_base 14: mod_base = OTHER; note = 2'-O-methyl modified nucleotide with phosphorothioate linkage
  modified_base 15: mod_base = OTHER; note = 2'-fluoro trivalent N-acetylgalactosamine modified nucleotide
taactcactataata

SEQ ID NO: 1873 - RNA, 15 nt, synthetic construct
  source 1..15: mol_type = other RNA
  modified_base 1: mod_base = OTHER; note = 2'-fluoro modified nucleotide with phosphorothioate linkage
  modified_base 2: mod_base = OTHER; note = 2'-O-methyl modified nucleotide with phosphorothioate linkage
  modified_base 3: mod_base = OTHER; note = 2'-fluoro modified nucleotide
  modified_base 4: mod_base = OTHER; note = 2'-O-methyl modified nucleotide
  modified_base 5: mod_base = OTHER; note = 2'-fluoro modified nucleotide
  modified_base 6: mod_base = OTHER; note = 2'-O-methyl modified nucleotide
  modified_base 7: mod_base = OTHER; note = 2'-fluoro modified nucleotide
  modified_base 8: mod_base = OTHER; note = 2'-O-methyl modified nucleotide
  modified_base 9: mod_base = OTHER; note = 2'-fluoro modified nucleotide
  modified_base 10: mod_base = OTHER; note = 2'-O-methyl modified nucleotide
  modified_base 11: mod_base = OTHER; note = 2'-fluoro modified nucleotide
  modified_base 12: mod_base = OTHER; note = 2'-O-methyl modified nucleotide
  modified_base 13: mod_base = OTHER; note = 2'-fluoro modified nucleotide with phosphorothioate linkage
  modified_base 14: mod_base = OTHER; note = 2'-O-methyl modified nucleotide with phosphorothioate linkage
  modified_base 15: mod_base = OTHER; note = 2'-fluoro trivalent N-acetylgalactosamine modified nucleotide
gacatctgacttgga

SEQ ID NO: 1874 - RNA, 15 nt, synthetic construct
  source 1..15: mol_type = other RNA
  modified_base 1: mod_base = OTHER; note = 2'-fluoro modified nucleotide with phosphorothioate linkage
  modified_base 2: mod_base = OTHER; note = 2'-O-methyl modified nucleotide with phosphorothioate linkage
  modified_base 3: mod_base = OTHER; note = 2'-fluoro modified nucleotide
  modified_base 4: mod_base = OTHER; note = 2'-O-methyl modified nucleotide
  modified_base 5: mod_base = OTHER; note = 2'-fluoro modified nucleotide
  modified_base 6: mod_base = OTHER; note = 2'-O-methyl modified nucleotide
  modified_base 7: mod_base = OTHER; note = 2'-fluoro modified nucleotide
  modified_base 8: mod_base = OTHER; note = 2'-O-methyl modified nucleotide
  modified_base 9: mod_base = OTHER; note = 2'-fluoro modified nucleotide
  modified_base 10: mod_base = OTHER; note = 2'-O-methyl modified nucleotide
  modified_base 11: mod_base = OTHER; note = 2'-fluoro modified nucleotide
  modified_base 12: mod_base = OTHER; note = 2'-O-methyl modified nucleotide
  modified_base 13: mod_base = OTHER; note = 2'-fluoro modified nucleotide with phosphorothioate linkage
  modified_base 14: mod_base = OTHER; note = 2'-O-methyl modified nucleotide with phosphorothioate linkage
  modified_base 15: mod_base = OTHER; note = 2'-fluoro trivalent N-acetylgalactosamine modified nucleotide
tatctcttttcctga

SEQ ID NO: 1875 - RNA, 15 nt, synthetic construct
  source 1..15: mol_type = other RNA
  modified_base 1: mod_base = OTHER; note = 2'-fluoro modified nucleotide with phosphorothioate linkage
  modified_base 2: mod_base = OTHER; note = 2'-O-methyl modified nucleotide with phosphorothioate linkage
  modified_base 3: mod_base = OTHER; note = 2'-fluoro modified nucleotide
  modified_base 4: mod_base = OTHER; note = 2'-O-methyl modified nucleotide
  modified_base 5: mod_base = OTHER; note = 2'-fluoro modified nucleotide
  modified_base 6: mod_base = OTHER; note = 2'-O-methyl modified nucleotide
  modified_base 7: mod_base = OTHER; note = 2'-fluoro modified nucleotide
  modified_base 8: mod_base = OTHER; note = 2'-O-methyl modified nucleotide
  modified_base 9: mod_base = OTHER; note = 2'-fluoro modified nucleotide
  modified_base 10: mod_base = OTHER; note = 2'-O-methyl modified nucleotide
  modified_base 11: mod_base = OTHER; note = 2'-fluoro modified nucleotide
  modified_base 12: mod_base = OTHER; note = 2'-O-methyl modified nucleotide
  modified_base 13: mod_base = OTHER; note = 2'-fluoro modified nucleotide with phosphorothioate linkage
  modified_base 14: mod_base = OTHER; note = 2'-O-methyl modified nucleotide with phosphorothioate linkage
  modified_base 15: mod_base = OTHER; note = 2'-fluoro trivalent N-acetylgalactosamine modified nucleotide
agaatatgtcttgca

SEQ ID NO: 1876 - RNA, 15 nt, synthetic construct
  source 1..15: mol_type = other RNA
  modified_base 1: mod_base = OTHER; note = 2'-fluoro modified nucleotide with phosphorothioate linkage
  modified_base 2: mod_base = OTHER; note = 2'-O-methyl modified nucleotide with phosphorothioate linkage
  modified_base 3: mod_base = OTHER; note = 2'-fluoro modified nucleotide
  modified_base 4: mod_base = OTHER; note = 2'-O-methyl modified nucleotide
  modified_base 5: mod_base = OTHER; note = 2'-fluoro modified nucleotide
  modified_base 6: mod_base = OTHER; note = 2'-O-methyl modified nucleotide
  modified_base 7: mod_base = OTHER; note = 2'-fluoro modified nucleotide
  modified_base 8: mod_base = OTHER; note = 2'-O-methyl modified nucleotide
  modified_base 9: mod_base = OTHER; note = 2'-fluoro modified nucleotide
  modified_base 10: mod_base = OTHER; note = 2'-O-methyl modified nucleotide
  modified_base 11: mod_base = OTHER; note = 2'-fluoro modified nucleotide
  modified_base 12: mod_base = OTHER; note = 2'-O-methyl modified nucleotide
  modified_base 13: mod_base = OTHER; note = 2'-fluoro modified nucleotide with phosphorothioate linkage
  modified_base 14: mod_base = OTHER; note = 2'-O-methyl modified nucleotide with phosphorothioate linkage
  modified_base 15: mod_base = OTHER; note = 2'-fluoro trivalent N-acetylgalactosamine modified nucleotide
tggaaattggcctta

SEQ ID NO: 1877 - RNA, 15 nt, synthetic construct
  source 1..15: mol_type = other RNA
  modified_base 1: mod_base = OTHER; note = 2'-fluoro modified nucleotide with phosphorothioate linkage
  modified_base 2: mod_base = OTHER; note = 2'-O-methyl modified nucleotide with phosphorothioate linkage
  modified_base 3: mod_base = OTHER; note = 2'-fluoro modified nucleotide
  modified_base 4: mod_base = OTHER; note = 2'-O-methyl modified nucleotide
  modified_base 5: mod_base = OTHER; note = 2'-fluoro modified nucleotide
  modified_base 6: mod_base = OTHER; note = 2'-O-methyl modified nucleotide
  modified_base 7: mod_base = OTHER; note = 2'-fluoro modified nucleotide
  modified_base 8: mod_base = OTHER; note = 2'-O-methyl modified nucleotide
  modified_base 9: mod_base = OTHER; note = 2'-fluoro modified nucleotide
  modified_base 10: mod_base = OTHER; note = 2'-O-methyl modified nucleotide
  modified_base 11: mod_base = OTHER; note = 2'-fluoro modified nucleotide
  modified_base 12: mod_base = OTHER; note = 2'-O-methyl modified nucleotide
  modified_base 13: mod_base = OTHER; note = 2'-fluoro modified nucleotide with phosphorothioate linkage
  modified_base 14: mod_base = OTHER; note = 2'-O-methyl modified nucleotide with phosphorothioate linkage
  modified_base 15: mod_base = OTHER; note = 2'-fluoro trivalent N-acetylgalactosamine modified nucleotide
cactataattactta

SEQ ID NO: 1878 - RNA, 15 nt, synthetic construct
  source 1..15: mol_type = other RNA
  modified_base 1: mod_base = OTHER; note = 2'-fluoro modified nucleotide with phosphorothioate linkage
  modified_base 2: mod_base = OTHER; note = 2'-O-methyl modified nucleotide with phosphorothioate linkage
  modified_base 3: mod_base = OTHER; note = 2'-fluoro modified nucleotide
  modified_base 4: mod_base = OTHER; note = 2'-O-methyl modified nucleotide
  modified_base 5: mod_base = OTHER; note = 2'-fluoro modified nucleotide
  modified_base 6: mod_base = OTHER; note = 2'-O-methyl modified nucleotide
  modified_base 7: mod_base = OTHER; note = 2'-fluoro modified nucleotide
  modified_base 8: mod_base = OTHER; note = 2'-O-methyl modified nucleotide
  modified_base 9: mod_base = OTHER; note = 2'-fluoro modified nucleotide
  modified_base 10: mod_base = OTHER; note = 2'-O-methyl modified nucleotide
  modified_base 11: mod_base = OTHER; note = 2'-fluoro modified nucleotide
  modified_base 12: mod_base = OTHER; note = 2'-O-methyl modified nucleotide
  modified_base 13: mod_base = OTHER; note = 2'-fluoro modified nucleotide with phosphorothioate linkage
  modified_base 14: mod_base = OTHER; note = 2'-O-methyl modified nucleotide with phosphorothioate linkage
  modified_base 15: mod_base = OTHER; note = 2'-fluoro trivalent N-acetylgalactosamine modified nucleotide
attacttgattttaa

SEQ ID NO: 1879 - RNA, 15 nt, synthetic construct
  source 1..15: mol_type = other RNA
  modified_base 1: mod_base = OTHER; note = 2'-fluoro modified nucleotide with phosphorothioate linkage
  modified_base 2: mod_base = OTHER; note = 2'-O-methyl modified nucleotide with phosphorothioate linkage
  modified_base 3: mod_base = OTHER; note = 2'-fluoro modified nucleotide
  modified_base 4: mod_base = OTHER; note = 2'-O-methyl modified nucleotide
  modified_base 5: mod_base = OTHER; note = 2'-fluoro modified nucleotide
  modified_base 6: mod_base = OTHER; note = 2'-O-methyl modified nucleotide
  modified_base 7: mod_base = OTHER; note = 2'-fluoro modified nucleotide
  modified_base 8: mod_base = OTHER; note = 2'-O-methyl modified nucleotide
  modified_base 9: mod_base = OTHER; note = 2'-fluoro modified nucleotide
  modified_base 10: mod_base = OTHER; note = 2'-O-methyl modified nucleotide
  modified_base 11: mod_base = OTHER; note = 2'-fluoro modified nucleotide
  modified_base 12: mod_base = OTHER; note = 2'-O-methyl modified nucleotide
  modified_base 13: mod_base = OTHER; note = 2'-fluoro modified nucleotide with phosphorothioate linkage
  modified_base 14: mod_base = OTHER; note = 2'-O-methyl modified nucleotide with phosphorothioate linkage
  modified_base 15: mod_base = OTHER; note = 2'-fluoro trivalent N-acetylgalactosamine modified nucleotide
ctataattacttgaa

SEQ ID NO: 1880 - RNA, 15 nt, synthetic construct
  source 1..15: mol_type = other RNA
  modified_base 1: mod_base = OTHER; note = 2'-fluoro modified nucleotide with phosphorothioate linkage
  modified_base 2: mod_base = OTHER; note = 2'-O-methyl modified nucleotide with phosphorothioate linkage
  modified_base 3: mod_base = OTHER; note = 2'-fluoro modified nucleotide
  modified_base 4: mod_base = OTHER; note = 2'-O-methyl modified nucleotide
  modified_base 5: mod_base = OTHER; note = 2'-fluoro modified nucleotide
  modified_base 6: mod_base = OTHER; note = 2'-O-methyl modified nucleotide
  modified_base 7: mod_base = OTHER; note = 2'-fluoro modified nucleotide
  modified_base 8: mod_base = OTHER; note = 2'-O-methyl modified nucleotide
  modified_base 9: mod_base = OTHER; note = 2'-fluoro modified nucleotide
  modified_base 10: mod_base = OTHER; note = 2'-O-methyl modified nucleotide
  modified_base 11: mod_base = OTHER; note = 2'-fluoro modified nucleotide
  modified_base 12: mod_base = OTHER; note = 2'-O-methyl modified nucleotide
  modified_base 13: mod_base = OTHER; note = 2'-fluoro modified nucleotide with phosphorothioate linkage
  modified_base 14: mod_base = OTHER; note = 2'-O-methyl modified nucleotide with phosphorothioate linkage
  modified_base 15: mod_base = OTHER; note = 2'-fluoro trivalent N-acetylgalactosamine modified nucleotide
cctctggaaattgga

SEQ ID NO: 1881 - RNA, 15 nt, synthetic construct
  source 1..15: mol_type = other RNA
  modified_base 1: mod_base = OTHER; note = 2'-fluoro modified nucleotide with phosphorothioate linkage
  modified_base 2: mod_base = OTHER; note = 2'-O-methyl modified nucleotide with phosphorothioate linkage
  modified_base 3: mod_base = OTHER; note = 2'-fluoro modified nucleotide
  modified_base 4: mod_base = OTHER; note = 2'-O-methyl modified nucleotide
  modified_base 5: mod_base = OTHER; note = 2'-fluoro modified nucleotide
  modified_base 6: mod_base = OTHER; note = 2'-O-methyl modified nucleotide
  modified_base 7: mod_base = OTHER; note = 2'-fluoro modified nucleotide
  modified_base 8: mod_base = OTHER; note = 2'-O-methyl modified nucleotide
  modified_base 9: mod_base = OTHER; note = 2'-fluoro modified nucleotide
  modified_base 10: mod_base = OTHER; note = 2'-O-methyl modified nucleotide
  modified_base 11: mod_base = OTHER; note = 2'-fluoro modified nucleotide
  modified_base 12: mod_base = OTHER; note = 2'-O-methyl modified nucleotide
  modified_base 13: mod_base = OTHER; note = 2'-fluoro modified nucleotide with phosphorothioate linkage
  modified_base 14: mod_base = OTHER; note = 2'-O-methyl modified nucleotide with phosphorothioate linkage
  modified_base 15: mod_base = OTHER; note = 2'-fluoro trivalent N-acetylgalactosamine modified nucleotide
ctcactataattaca

SEQ ID NO: 1882 - RNA, 15 nt, synthetic construct
  source 1..15: mol_type = other RNA
  modified_base 1: mod_base = OTHER; note = 2'-fluoro modified nucleotide with phosphorothioate linkage
  modified_base 2: mod_base = OTHER; note = 2'-O-methyl modified nucleotide with phosphorothioate linkage
  modified_base 3: mod_base = OTHER; note = 2'-fluoro modified nucleotide
  modified_base 4: mod_base = OTHER; note = 2'-O-methyl modified nucleotide
  modified_base 5: mod_base = OTHER; note = 2'-fluoro modified nucleotide
  modified_base 6: mod_base = OTHER; note = 2'-O-methyl modified nucleotide
  modified_base 7: mod_base = OTHER; note = 2'-fluoro modified nucleotide
  modified_base 8: mod_base = OTHER; note = 2'-O-methyl modified nucleotide
  modified_base 9: mod_base = OTHER; note = 2'-fluoro modified nucleotide
  modified_base 10: mod_base = OTHER; note = 2'-O-methyl modified nucleotide
  modified_base 11: mod_base = OTHER; note = 2'-fluoro modified nucleotide
  modified_base 12: mod_base = OTHER; note = 2'-O-methyl modified nucleotide
  modified_base 13: mod_base = OTHER; note = 2'-fluoro modified nucleotide with phosphorothioate linkage
  modified_base 14: mod_base = OTHER; note = 2'-O-methyl modified nucleotide with phosphorothioate linkage
  modified_base 15: mod_base = OTHER; note = 2'-fluoro trivalent N-acetylgalactosamine modified nucleotide
caacaagtaccttta

SEQ ID NO: 1883 - RNA, 15 nt, synthetic construct
  source 1..15: mol_type = other RNA
  modified_base 1: mod_base = OTHER; note = 2'-fluoro modified nucleotide with phosphorothioate linkage
  modified_base 2: mod_base = OTHER; note = 2'-O-methyl modified nucleotide with phosphorothioate linkage
  modified_base 3: mod_base = OTHER; note = 2'-fluoro modified nucleotide
  modified_base 4: mod_base = OTHER; note = 2'-O-methyl modified nucleotide
  modified_base 5: mod_base = OTHER; note = 2'-fluoro modified nucleotide
  modified_base 6: mod_base = OTHER; note = 2'-O-methyl modified nucleotide
  modified_base 7: mod_base = OTHER; note = 2'-fluoro modified nucleotide
  modified_base 8: mod_base = OTHER; note = 2'-O-methyl modified nucleotide
  modified_base 9: mod_base = OTHER; note = 2'-fluoro modified nucleotide
  modified_base 10: mod_base = OTHER; note = 2'-O-methyl modified nucleotide
  modified_base 11: mod_base = OTHER; note = 2'-fluoro modified nucleotide
  modified_base 12: mod_base = OTHER; note = 2'-O-methyl modified nucleotide
  modified_base 13: mod_base = OTHER; note = 2'-fluoro modified nucleotide with phosphorothioate linkage
  modified_base 14: mod_base = OTHER; note = 2'-O-methyl modified nucleotide with phosphorothioate linkage
  modified_base 15: mod_base = OTHER; note = 2'-fluoro trivalent N-acetylgalactosamine modified nucleotide
tctgaaacagcagta

SEQ ID NO: 1884 - RNA, 15 nt, synthetic construct
  source 1..15: mol_type = other RNA
  modified_base 1: mod_base = OTHER; note = 2'-fluoro modified nucleotide with phosphorothioate linkage
  modified_base 2: mod_base = OTHER; note = 2'-O-methyl modified nucleotide with phosphorothioate linkage
  modified_base 3: mod_base = OTHER; note = 2'-fluoro modified nucleotide
  modified_base 4: mod_base = OTHER; note = 2'-O-methyl modified nucleotide
  modified_base 5: mod_base = OTHER; note = 2'-fluoro modified nucleotide
  modified_base 6: mod_base = OTHER; note = 2'-O-methyl modified nucleotide
  modified_base 7: mod_base = OTHER; note = 2'-fluoro modified nucleotide
  modified_base 8: mod_base = OTHER; note = 2'-O-methyl modified nucleotide
  modified_base 9: mod_base = OTHER; note = 2'-fluoro modified nucleotide
  modified_base 10: mod_base = OTHER; note = 2'-O-methyl modified nucleotide
  modified_base 11: mod_base = OTHER; note = 2'-fluoro modified nucleotide
  modified_base 12: mod_base = OTHER; note = 2'-O-methyl modified nucleotide
  modified_base 13: mod_base = OTHER; note = 2'-fluoro modified nucleotide with phosphorothioate linkage
  modified_base 14: mod_base = OTHER; note = 2'-O-methyl modified nucleotide with phosphorothioate linkage
  modified_base 15: mod_base = OTHER; note = 2'-fluoro trivalent N-acetylgalactosamine modified nucleotide
ttctgaaacagcaga

SEQ ID NO: 1885 - RNA, 15 nt, synthetic construct
  source 1..15: mol_type = other RNA
  modified_base 1: mod_base = OTHER; note = 2'-fluoro modified nucleotide with phosphorothioate linkage
  modified_base 2: mod_base = OTHER; note = 2'-O-methyl modified nucleotide with phosphorothioate linkage
  modified_base 3: mod_base = OTHER; note = 2'-fluoro modified nucleotide
  modified_base 4: mod_base = OTHER; note = 2'-O-methyl modified nucleotide
  modified_base 5: mod_base = OTHER; note = 2'-fluoro modified nucleotide
  modified_base 6: mod_base = OTHER; note = 2'-O-methyl modified nucleotide
  modified_base 7: mod_base = OTHER; note = 2'-fluoro modified nucleotide
  modified_base 8: mod_base = OTHER; note = 2'-O-methyl modified nucleotide
  modified_base 9: mod_base = OTHER; note = 2'-fluoro modified nucleotide
  modified_base 10: mod_base = OTHER; note = 2'-O-methyl modified nucleotide
  modified_base 11: mod_base = OTHER; note = 2'-fluoro modified nucleotide
  modified_base 12: mod_base = OTHER; note = 2'-O-methyl modified nucleotide
  modified_base 13: mod_base = OTHER; note = 2'-fluoro modified nucleotide with phosphorothioate linkage
  modified_base 14: mod_base = OTHER; note = 2'-O-methyl modified nucleotide with phosphorothioate linkage
  modified_base 15: mod_base = OTHER; note = 2'-fluoro trivalent N-acetylgalactosamine modified nucleotide
caagtacctttataa

SEQ ID NO: 1886 - RNA, 15 nt, synthetic construct
  source 1..15: mol_type = other RNA
  modified_base 1: mod_base = OTHER; note = 2'-fluoro modified nucleotide with phosphorothioate linkage
  modified_base 2: mod_base = OTHER; note = 2'-O-methyl modified nucleotide with phosphorothioate linkage
  modified_base 3: mod_base = OTHER; note = 2'-fluoro modified nucleotide
  modified_base 4: mod_base = OTHER; note = 2'-O-methyl modified nucleotide
  modified_base 5: mod_base = OTHER; note = 2'-fluoro modified nucleotide
  modified_base 6: mod_base = OTHER; note = 2'-O-methyl modified nucleotide
  modified_base 7: mod_base = OTHER; note = 2'-fluoro modified nucleotide
  modified_base 8: mod_base = OTHER; note = 2'-O-methyl modified nucleotide
  modified_base 9: mod_base = OTHER; note = 2'-fluoro modified nucleotide
  modified_base 10: mod_base = OTHER; note = 2'-O-methyl modified nucleotide
  modified_base 11: mod_base = OTHER; note = 2'-fluoro modified nucleotide
  modified_base 12: mod_base = OTHER; note = 2'-O-methyl modified nucleotide
  modified_base 13: mod_base = OTHER; note = 2'-fluoro modified nucleotide with phosphorothioate linkage
  modified_base 14: mod_base = OTHER; note = 2'-O-methyl modified nucleotide with phosphorothioate linkage
  modified_base 15: mod_base = OTHER; note = 2'-fluoro trivalent N-acetylgalactosamine modified nucleotide
aaggaactgtttaca

SEQ ID NO: 1887 - RNA, 15 nt, synthetic construct
  source 1..15: mol_type = other RNA
  modified_base 1: mod_base = OTHER; note = 2'-fluoro modified nucleotide with phosphorothioate linkage
  modified_base 2: mod_base = OTHER; note = 2'-O-methyl modified nucleotide with phosphorothioate linkage
  modified_base 3: mod_base = OTHER; note = 2'-fluoro modified nucleotide
  modified_base 4: mod_base = OTHER; note = 2'-O-methyl modified nucleotide
  modified_base 5: mod_base = OTHER; note = 2'-fluoro modified nucleotide
  modified_base 6: mod_base = OTHER; note = 2'-O-methyl modified nucleotide
  modified_base 7: mod_base = OTHER; note = 2'-fluoro modified nucleotide
  modified_base 8: mod_base = OTHER; note = 2'-O-methyl modified nucleotide
  modified_base 9: mod_base = OTHER; note = 2'-fluoro modified nucleotide
  modified_base 10: mod_base = OTHER; note = 2'-O-methyl modified nucleotide
  modified_base 11: mod_base = OTHER; note = 2'-fluoro modified nucleotide
  modified_base 12: mod_base = OTHER; note = 2'-O-methyl modified nucleotide
  modified_base 13: mod_base = OTHER; note = 2'-fluoro modified nucleotide with phosphorothioate linkage
  modified_base 14: mod_base = OTHER; note = 2'-O-methyl modified nucleotide with phosphorothioate linkage
  modified_base 15: mod_base = OTHER; note = 2'-fluoro trivalent N-acetylgalactosamine modified nucleotide
tcagccaaagttaca

SEQ ID NO: 1888 - RNA, 15 nt, synthetic construct
  source 1..15: mol_type = other RNA
  modified_base 1: mod_base = OTHER; note = 2'-fluoro modified nucleotide with phosphorothioate linkage
  modified_base 2: mod_base = OTHER; note = 2'-O-methyl modified nucleotide with phosphorothioate linkage
  modified_base 3: mod_base = OTHER; note = 2'-fluoro modified nucleotide
  modified_base 4: mod_base = OTHER; note = 2'-O-methyl modified nucleotide
  modified_base 5: mod_base = OTHER; note = 2'-fluoro modified nucleotide
  modified_base 6: mod_base = OTHER; note = 2'-O-methyl modified nucleotide
  modified_base 7: mod_base = OTHER; note = 2'-fluoro modified nucleotide
  modified_base 8: mod_base = OTHER; note = 2'-O-methyl modified nucleotide
  modified_base 9: mod_base = OTHER; note = 2'-fluoro modified nucleotide
  modified_base 10: mod_base = OTHER; note = 2'-O-methyl modified nucleotide
  modified_base 11: mod_base = OTHER; note = 2'-fluoro modified nucleotide
  modified_base 12: mod_base = OTHER; note = 2'-O-methyl modified nucleotide
  modified_base 13: mod_base = OTHER; note = 2'-fluoro modified nucleotide with phosphorothioate linkage
  modified_base 14: mod_base = OTHER; note = 2'-O-methyl modified nucleotide with phosphorothioate linkage
  modified_base 15: mod_base = OTHER; note = 2'-fluoro trivalent N-acetylgalactosamine modified nucleotide
ctgtttacaactata

SEQ ID NO: 1889 - RNA, 15 nt, synthetic construct
  source 1..15: mol_type = other RNA
  modified_base 1: mod_base = OTHER; note = 2'-fluoro modified nucleotide with phosphorothioate linkage
  modified_base 2: mod_base = OTHER; note = 2'-O-methyl modified nucleotide with phosphorothioate linkage
  modified_base 3: mod_base = OTHER; note = 2'-fluoro modified nucleotide
  modified_base 4: mod_base = OTHER; note = 2'-O-methyl modified nucleotide
  modified_base 5: mod_base = OTHER; note = 2'-fluoro modified nucleotide
  modified_base 6: mod_base = OTHER; note = 2'-O-methyl modified nucleotide
  modified_base 7: mod_base = OTHER; note = 2'-fluoro modified nucleotide
  modified_base 8: mod_base = OTHER; note = 2'-O-methyl modified nucleotide
  modified_base 9: mod_base = OTHER; note = 2'-fluoro modified nucleotide
  modified_base 10: mod_base = OTHER; note = 2'-O-methyl modified nucleotide
  modified_base 11: mod_base = OTHER; note = 2'-fluoro modified nucleotide
  modified_base 12: mod_base = OTHER; note = 2'-O-methyl modified nucleotide
  modified_base 13: mod_base = OTHER; note = 2'-fluoro modified nucleotide with phosphorothioate linkage
  modified_base 14: mod_base = OTHER; note = 2'-O-methyl modified nucleotide with phosphorothioate linkage
  modified_base 15: mod_base = OTHER; note = 2'-fluoro trivalent N-acetylgalactosamine modified nucleotide
agttaaagaatatga

SEQ ID NO: 1890 - RNA, 15 nt, synthetic construct
  source 1..15: mol_type = other RNA
  modified_base 1: mod_base = OTHER; note = 2'-fluoro modified nucleotide with phosphorothioate linkage
  modified_base 2: mod_base = OTHER; note = 2'-O-methyl modified nucleotide with phosphorothioate linkage
  modified_base 3: mod_base = OTHER; note = 2'-fluoro modified nucleotide
  modified_base 4: mod_base = OTHER; note = 2'-O-methyl modified nucleotide
  modified_base 5: mod_base = OTHER; note = 2'-fluoro modified nucleotide
  modified_base 6: mod_base = OTHER; note = 2'-O-methyl modified nucleotide
  modified_base 7: mod_base = OTHER; note = 2'-fluoro modified nucleotide
  modified_base 8: mod_base = OTHER; note = 2'-O-methyl modified nucleotide
  modified_base 9: mod_base = OTHER; note = 2'-fluoro modified nucleotide
  modified_base 10: mod_base = OTHER; note = 2'-O-methyl modified nucleotide
  modified_base 11: mod_base = OTHER; note = 2'-fluoro modified nucleotide
  modified_base 12: mod_base = OTHER; note = 2'-O-methyl modified nucleotide
  modified_base 13: mod_base = OTHER; note = 2'-fluoro modified nucleotide with phosphorothioate linkage
  modified_base 14: mod_base = OTHER; note = 2'-O-methyl modified nucleotide with phosphorothioate linkage
  modified_base 15: mod_base = OTHER; note = 2'-fluoro trivalent N-acetylgalactosamine modified nucleotide
gtaaaaggactgcta

SEQ ID NO: 1891 - RNA, 15 nt, synthetic construct
  source 1..15: mol_type = other RNA
  modified_base 1: mod_base = OTHER; note = 2'-fluoro modified nucleotide with phosphorothioate linkage
  modified_base 2: mod_base = OTHER; note = 2'-O-methyl modified nucleotide with phosphorothioate linkage
  modified_base 3: mod_base = OTHER; note = 2'-fluoro modified nucleotide
  modified_base 4: mod_base = OTHER; note = 2'-O-methyl modified nucleotide
  modified_base 5: mod_base = OTHER; note = 2'-fluoro modified nucleotide
  modified_base 6: mod_base = OTHER; note = 2'-O-methyl modified nucleotide
  modified_base 7: mod_base = OTHER; note = 2'-fluoro modified nucleotide
  modified_base 8: mod_base = OTHER; note = 2'-O-methyl modified nucleotide
  modified_base 9: mod_base = OTHER; note = 2'-fluoro modified nucleotide
  modified_base 10: mod_base = OTHER; note = 2'-O-methyl modified nucleotide
  modified_base 11: mod_base = OTHER; note = 2'-fluoro modified nucleotide
  modified_base 12: mod_base = OTHER; note = 2'-O-methyl modified nucleotide
  modified_base 13: mod_base = OTHER; note = 2'-fluoro modified nucleotide with phosphorothioate linkage
  modified_base 14: mod_base = OTHER; note = 2'-O-methyl modified nucleotide with phosphorothioate linkage
  modified_base 15: mod_base = OTHER; note = 2'-fluoro trivalent N-acetylgalactosamine modified nucleotide
caaaataactcacta

SEQ ID NO: 1892 - RNA, 15 nt, synthetic construct
  source 1..15: mol_type = other RNA
  modified_base 1: mod_base = OTHER; note = 2'-fluoro modified nucleotide with phosphorothioate linkage
  modified_base 2: mod_base = OTHER; note = 2'-O-methyl modified nucleotide with phosphorothioate linkage
  modified_base 3: mod_base = OTHER; note = 2'-fluoro modified nucleotide
  modified_base 4: mod_base = OTHER; note = 2'-O-methyl modified nucleotide
  modified_base 5: mod_base = OTHER; note = 2'-fluoro modified nucleotide
  modified_base 6: mod_base = OTHER; note = 2'-O-methyl modified nucleotide
  modified_base 7: mod_base = OTHER; note = 2'-fluoro modified nucleotide
  modified_base 8: mod_base = OTHER; note = 2'-O-methyl modified nucleotide
  modified_base 9: mod_base = OTHER; note = 2'-fluoro modified nucleotide
  modified_base 10: mod_base = OTHER; note = 2'-O-methyl modified nucleotide
  modified_base 11: mod_base = OTHER; note = 2'-fluoro modified nucleotide
  modified_base 12: mod_base = OTHER; note = 2'-O-methyl modified nucleotide
  modified_base 13: mod_base = OTHER; note = 2'-fluoro modified nucleotide with phosphorothioate linkage
  modified_base 14: mod_base = OTHER; note = 2'-O-methyl modified nucleotide with phosphorothioate linkage
  modified_base 15: mod_base = OTHER; note = 2'-fluoro trivalent N-acetylgalactosamine modified nucleotide
caaagatgtcttcca

SEQ ID NO: 1893 - RNA, 15 nt, synthetic construct
  source 1..15: mol_type = other RNA
  modified_base 1: mod_base = OTHER; note = 2'-fluoro modified nucleotide with phosphorothioate linkage
  modified_base 2: mod_base = OTHER; note = 2'-O-methyl modified nucleotide with phosphorothioate linkage
  modified_base 3: mod_base = OTHER; note = 2'-fluoro modified nucleotide
  modified_base 4: mod_base = OTHER; note = 2'-O-methyl modified nucleotide
  modified_base 5: mod_base = OTHER; note = 2'-fluoro modified nucleotide
  modified_base 6: mod_base = OTHER; note = 2'-O-methyl modified nucleotide
  modified_base 7: mod_base = OTHER; note = 2'-fluoro modified nucleotide
  modified_base 8: mod_base = OTHER; note = 2'-O-methyl modified nucleotide
  modified_base 9: mod_base = OTHER; note = 2'-fluoro modified nucleotide
  modified_base 10: mod_base = OTHER; note = 2'-O-methyl modified nucleotide
  modified_base 11: mod_base = OTHER; note = 2'-fluoro modified nucleotide
  modified_base 12: mod_base = OTHER; note = 2'-O-methyl modified nucleotide
  modified_base 13: mod_base = OTHER; note = 2'-fluoro modified nucleotide with phosphorothioate linkage
  modified_base 14: mod_base = OTHER; note = 2'-O-methyl modified nucleotide with phosphorothioate linkage
  modified_base 15: mod_base = OTHER; note = 2'-fluoro trivalent N-acetylgalactosamine modified nucleotide
gtgtaaaaggactga

SEQ ID NO: 1894 - RNA, 15 nt, synthetic construct
  source 1..15: mol_type = other RNA
  modified_base 1: mod_base = OTHER; note = 2'-fluoro modified nucleotide with phosphorothioate linkage
  modified_base 2: mod_base = OTHER; note = 2'-O-methyl modified nucleotide with phosphorothioate linkage
  modified_base 3: mod_base = OTHER; note = 2'-fluoro modified nucleotide
  modified_base 4: mod_base = OTHER; note = 2'-O-methyl modified nucleotide
  modified_base 5: mod_base = OTHER; note = 2'-fluoro modified nucleotide
  modified_base 6: mod_base = OTHER; note = 2'-O-methyl modified nucleotide
  modified_base 7: mod_base = OTHER; note = 2'-fluoro modified nucleotide
  modified_base 8: mod_base = OTHER; note = 2'-O-methyl modified nucleotide
  modified_base 9: mod_base = OTHER; note = 2'-fluoro modified nucleotide
  modified_base 10: mod_base = OTHER; note = 2'-O-methyl modified nucleotide
  modified_base 11: mod_base = OTHER; note = 2'-fluoro modified nucleotide
  modified_base 12: mod_base = OTHER; note = 2'-O-methyl modified nucleotide
  modified_base 13: mod_base = OTHER; note = 2'-fluoro modified nucleotide with phosphorothioate linkage
  modified_base 14: mod_base = OTHER; note = 2'-O-methyl modified nucleotide with phosphorothioate linkage
  modified_base 15: mod_base = OTHER; note = 2'-fluoro trivalent N-acetylgalactosamine modified nucleotide
attgacaaaataaca

SEQ ID NO: 1895 - RNA, 15 nt, synthetic construct
  source 1..15: mol_type = other RNA
  modified_base 1: mod_base = OTHER; note = 2'-fluoro modified nucleotide with phosphorothioate linkage
  modified_base 2: mod_base = OTHER; note = 2'-O-methyl modified nucleotide with phosphorothioate linkage
  modified_base 3: mod_base = OTHER; note = 2'-fluoro modified nucleotide
  modified_base 4: mod_base = OTHER; note = 2'-O-methyl modified nucleotide
  modified_base 5: mod_base = OTHER; note = 2'-fluoro modified nucleotide
  modified_base 6: mod_base = OTHER; note = 2'-O-methyl modified nucleotide
  modified_base 7: mod_base = OTHER; note = 2'-fluoro modified nucleotide
  modified_base 8: mod_base = OTHER; note = 2'-O-methyl modified nucleotide
  modified_base 9: mod_base = OTHER; note = 2'-fluoro modified nucleotide
  modified_base 10: mod_base = OTHER; note = 2'-O-methyl modified nucleotide
  modified_base 11: mod_base = OTHER; note = 2'-fluoro modified nucleotide
  modified_base 12: mod_base = OTHER; note = 2'-O-methyl modified nucleotide
  modified_base 13: mod_base = OTHER; note = 2'-fluoro modified nucleotide with phosphorothioate linkage
  modified_base 14: mod_base = OTHER; note = 2'-O-methyl modified nucleotide with phosphorothioate linkage
  modified_base 15: mod_base = OTHER; note = 2'-fluoro trivalent N-acetylgalactosamine modified nucleotide
catattctgttgtaa

SEQ ID NO: 1896 - RNA, 15 nt, synthetic construct
  source 1..15: mol_type = other RNA
  modified_base 1: mod_base = OTHER; note = 2'-fluoro modified nucleotide with phosphorothioate linkage
  modified_base 2: mod_base = OTHER; note = 2'-O-methyl modified nucleotide with phosphorothioate linkage
  modified_base 3: mod_base = OTHER; note = 2'-fluoro modified nucleotide
  modified_base 4: mod_base = OTHER; note = 2'-O-methyl modified nucleotide
  modified_base 5: mod_base = OTHER; note = 2'-fluoro modified nucleotide
  modified_base 6: mod_base = OTHER; note = 2'-O-methyl modified nucleotide
  modified_base 7: mod_base = OTHER; note = 2'-fluoro modified nucleotide
  modified_base 8: mod_base = OTHER; note = 2'-O-methyl modified nucleotide
  modified_base 9: mod_base = OTHER; note = 2'-fluoro modified nucleotide
  modified_base 10: mod_base = OTHER; note = 2'-O-methyl modified nucleotide
  modified_base 11: mod_base = OTHER; note = 2'-fluoro modified nucleotide
  modified_base 12: mod_base = OTHER; note = 2'-O-methyl modified nucleotide
  modified_base 13: mod_base = OTHER; note = 2'-fluoro modified nucleotide with phosphorothioate linkage
  modified_base 14: mod_base = OTHER; note = 2'-O-methyl modified nucleotide with phosphorothioate linkage
  modified_base 15: mod_base = OTHER; note = 2'-fluoro trivalent N-acetylgalactosamine modified nucleotide
tattgacaaaataaa

SEQ ID NO: 1897 - RNA, 15 nt, synthetic construct
  source 1..15: mol_type = other RNA
  modified_base 1: mod_base = OTHER; note = 2'-fluoro modified nucleotide with phosphorothioate linkage
  modified_base 2: mod_base = OTHER; note = 2'-O-methyl modified nucleotide with phosphorothioate linkage
  modified_base 3: mod_base = OTHER; note = 2'-fluoro modified nucleotide
  modified_base 4: mod_base = OTHER; note = 2'-O-methyl modified nucleotide
  modified_base 5: mod_base = OTHER; note = 2'-fluoro modified nucleotide
  modified_base 6: mod_base = OTHER; note = 2'-O-methyl modified nucleotide
  modified_base 7: mod_base = OTHER; note = 2'-fluoro modified nucleotide
  modified_base 8: mod_base = OTHER; note = 2'-O-methyl modified nucleotide
  modified_base 9: mod_base = OTHER; note = 2'-fluoro modified nucleotide
  modified_base 10: mod_base = OTHER; note = 2'-O-methyl modified nucleotide
  modified_base 11: mod_base = OTHER; note = 2'-fluoro modified nucleotide
  modified_base 12: mod_base = OTHER; note = 2'-O-methyl modified nucleotide
  modified_base 13: mod_base = OTHER; note = 2'-fluoro modified nucleotide with phosphorothioate linkage
  modified_base 14: mod_base = OTHER; note = 2'-O-methyl modified nucleotide with phosphorothioate linkage
  modified_base 15: mod_base = OTHER; note = 2'-fluoro trivalent N-acetylgalactosamine modified nucleotide
ttttcctgaagccta

SEQ ID NO: 1898 - RNA, 15 nt, synthetic construct
  source 1..15: mol_type = other RNA
  modified_base 1: mod_base = OTHER; note = 2'-fluoro modified nucleotide with phosphorothioate linkage
  modified_base 2: mod_base = OTHER; note = 2'-O-methyl modified nucleotide with phosphorothioate linkage
  modified_base 3: mod_base = OTHER; note = 2'-fluoro modified nucleotide
  modified_base 4: mod_base = OTHER; note = 2'-O-methyl modified nucleotide
  modified_base 5: mod_base = OTHER; note = 2'-fluoro modified nucleotide
  modified_base 6: mod_base = OTHER; note = 2'-O-methyl modified nucleotide
  modified_base 7: mod_base = OTHER; note = 2'-fluoro modified nucleotide
  modified_base 8: mod_base = OTHER; note = 2'-O-methyl modified nucleotide
  modified_base 9: mod_base = OTHER; note = 2'-fluoro modified nucleotide
  modified_base 10: mod_base = OTHER; note = 2'-O-methyl modified nucleotide
  modified_base 11: mod_base = OTHER; note = 2'-fluoro modified nucleotide
  modified_base 12: mod_base = OTHER; note = 2'-O-methyl modified nucleotide
  modified_base 13: mod_base = OTHER; note = 2'-fluoro modified nucleotide with phosphorothioate linkage
  modified_base 14: mod_base = OTHER; note = 2'-O-methyl modified nucleotide with phosphorothioate linkage
  modified_base 15: mod_base = OTHER; note = 2'-fluoro trivalent N-acetylgalactosamine modified nucleotide
attatctcttttcca

SEQ ID NO: 1899 - RNA, 15 nt, synthetic construct
  source 1..15: mol_type = other RNA
  modified_base 1: mod_base = OTHER; note = 2'-fluoro modified nucleotide with phosphorothioate linkage
  modified_base 2: mod_base = OTHER; note = 2'-O-methyl modified nucleotide with phosphorothioate linkage
  modified_base 3: mod_base = OTHER; note = 2'-fluoro modified nucleotide
  modified_base 4: mod_base = OTHER; note = 2'-O-methyl modified nucleotide
  modified_base 5: mod_base = OTHER; note = 2'-fluoro modified nucleotide
  modified_base 6: mod_base = OTHER; note = 2'-O-methyl modified nucleotide
  modified_base 7: mod_base = OTHER; note = 2'-fluoro modified nucleotide
  modified_base 8: mod_base = OTHER; note = 2'-O-methyl modified nucleotide
  modified_base 9: mod_base = OTHER; note = 2'-fluoro modified nucleotide
  modified_base 10: mod_base = OTHER; note = 2'-O-methyl modified nucleotide
  modified_base 11: mod_base = OTHER; note = 2'-fluoro modified nucleotide
  modified_base 12: mod_base = OTHER; note = 2'-O-methyl modified nucleotide
  modified_base 13: mod_base = OTHER; note = 2'-fluoro modified nucleotide with phosphorothioate linkage
  modified_base 14: mod_base = OTHER; note = 2'-O-methyl modified nucleotide with phosphorothioate linkage
  modified_base 15: mod_base = OTHER; note = 2'-fluoro trivalent N-acetylgalactosamine modified nucleotide
tatattgctgtaaca

SEQ ID NO: 1900 - RNA, 15 nt, synthetic construct
  source 1..15: mol_type = other RNA
  modified_base 1: mod_base = OTHER; note = 2'-fluoro modified nucleotide with phosphorothioate linkage
  modified_base 2: mod_base = OTHER; note = 2'-O-methyl modified nucleotide with phosphorothioate linkage
  modified_base 3: mod_base = OTHER; note = 2'-fluoro modified nucleotide
  modified_base 4: mod_base = OTHER; note = 2'-O-methyl modified nucleotide
  modified_base 5: mod_base = OTHER; note = 2'-fluoro modified nucleotide
  modified_base 6: mod_base = OTHER; note = 2'-O-methyl modified nucleotide
  modified_base 7: mod_base = OTHER; note = 2'-fluoro modified nucleotide
  modified_base 8: mod_base = OTHER; note = 2'-O-methyl modified nucleotide
  modified_base 9: mod_base = OTHER; note = 2'-fluoro modified nucleotide
  modified_base 10: mod_base = OTHER; note = 2'-O-methyl modified nucleotide
  modified_base 11: mod_base = OTHER; note = 2'-fluoro modified nucleotide
  modified_base 12: mod_base = OTHER; note = 2'-O-methyl modified nucleotide
  modified_base 13: mod_base = OTHER; note = 2'-fluoro modified nucleotide with phosphorothioate linkage
  modified_base 14: mod_base = OTHER; note = 2'-O-methyl modified nucleotide with phosphorothioate linkage
  modified_base 15: mod_base = OTHER; note = 2'-fluoro trivalent N-acetylgalactosamine modified nucleotide
ttgcatatgcttata

SEQ ID NO: 1901 - RNA, 15 nt, synthetic construct
  source 1..15: mol_type = other RNA
  modified_base 1: mod_base = OTHER; note = 2'-fluoro modified nucleotide with phosphorothioate linkage
  modified_base 2: mod_base = OTHER; note = 2'-O-methyl modified nucleotide with phosphorothioate linkage
  modified_base 3: mod_base = OTHER; note = 2'-fluoro modified nucleotide
  modified_base 4: mod_base = OTHER; note = 2'-O-methyl modified nucleotide
  modified_base 5: mod_base = OTHER; note = 2'-fluoro modified nucleotide
  modified_base 6: mod_base = OTHER; note = 2'-O-methyl modified nucleotide
  modified_base 7: mod_base = OTHER; note = 2'-fluoro modified nucleotide
  modified_base 8: mod_base = OTHER; note = 2'-O-methyl modified nucleotide
  modified_base 9: mod_base = OTHER; note = 2'-fluoro modified nucleotide
  modified_base 10: mod_base = OTHER; note = 2'-O-methyl modified nucleotide
  modified_base 11: mod_base = OTHER; note = 2'-fluoro modified nucleotide
  modified_base 12: mod_base = OTHER; note = 2'-O-methyl modified nucleotide
  modified_base 13: mod_base = OTHER; note = 2'-fluoro modified nucleotide with phosphorothioate linkage
  modified_base 14: mod_base = OTHER; note = 2'-O-methyl modified nucleotide with phosphorothioate linkage
  modified_base 15: mod_base = OTHER; note = 2'-fluoro trivalent N-acetylgalactosamine modified nucleotide
aagttaaagaatata

SEQ ID NO: 1902 - RNA, 15 nt, synthetic construct
  source 1..15: mol_type = other RNA
  modified_base 1: mod_base = OTHER; note = 2'-fluoro modified nucleotide with phosphorothioate linkage
  modified_base 2: mod_base = OTHER; note = 2'-O-methyl modified nucleotide with phosphorothioate linkage
  modified_base 3: mod_base = OTHER; note = 2'-fluoro modified nucleotide
  modified_base 4: mod_base = OTHER; note = 2'-O-methyl modified nucleotide
  modified_base 5: mod_base = OTHER; note = 2'-fluoro modified nucleotide
  modified_base 6: mod_base = OTHER; note = 2'-O-methyl modified nucleotide
  modified_base 7: mod_base = OTHER; note = 2'-fluoro modified nucleotide
  modified_base 8: mod_base = OTHER; note = 2'-O-methyl modified nucleotide
  modified_base 9: mod_base = OTHER; note = 2'-fluoro modified nucleotide
  modified_base 10: mod_base = OTHER; note = 2'-O-methyl modified nucleotide
  modified_base 11: mod_base = OTHER; note = 2'-fluoro modified nucleotide
  modified_base 12: mod_base = OTHER; note = 2'-O-methyl modified nucleotide
  modified_base 13: mod_base = OTHER; note = 2'-fluoro modified nucleotide with phosphorothioate linkage
  modified_base 14: mod_base = OTHER; note = 2'-O-methyl modified nucleotide with phosphorothioate linkage
  modified_base 15: mod_base = OTHER; note = 2'-fluoro trivalent N-acetylgalactosamine modified nucleotide
gttcaaagatgtcta

SEQ ID NO: 1903 - RNA, 15 nt, synthetic construct
  source 1..15: mol_type = other RNA
  modified_base 1: mod_base = OTHER; note = 2'-fluoro modified nucleotide with phosphorothioate linkage
  modified_base 2: mod_base = OTHER; note = 2'-O-methyl modified nucleotide with phosphorothioate linkage
  modified_base 3: mod_base = OTHER; note = 2'-fluoro modified nucleotide
  modified_base 4: mod_base = OTHER; note = 2'-O-methyl modified nucleotide
  modified_base 5: mod_base = OTHER; note = 2'-fluoro modified nucleotide
  modified_base 6: mod_base = OTHER; note = 2'-O-methyl modified nucleotide
  modified_base 7: mod_base = OTHER; note = 2'-fluoro modified nucleotide
  modified_base 8: mod_base = OTHER; note = 2'-O-methyl modified nucleotide
  modified_base 9: mod_base = OTHER; note = 2'-fluoro modified nucleotide
  modified_base 10: mod_base = OTHER; note = 2'-O-methyl modified nucleotide
  modified_base 11: mod_base = OTHER; note = 2'-fluoro modified nucleotide
  modified_base 12: mod_base = OTHER; note = 2'-O-methyl modified nucleotide
  modified_base 13: mod_base = OTHER; note = 2'-fluoro modified nucleotide with phosphorothioate linkage
  modified_base 14: mod_base = OTHER; note = 2'-O-methyl modified nucleotide with phosphorothioate linkage
  modified_base 15: mod_base = OTHER; note = 2'-fluoro trivalent N-acetylgalactosamine modified nucleotide
aagatgtcttcctga

SEQ ID NO: 1904 - RNA, 15 nt, synthetic construct
  source 1..15: mol_type = other RNA
  modified_base 1: mod_base = OTHER; note = 2'-fluoro modified nucleotide with phosphorothioate linkage
  modified_base 2: mod_base = OTHER; note = 2'-O-methyl modified nucleotide with phosphorothioate linkage
  modified_base 3: mod_base = OTHER; note = 2'-fluoro modified nucleotide
  modified_base 4: mod_base = OTHER; note = 2'-O-methyl modified nucleotide
  modified_base 5: mod_base = OTHER; note = 2'-fluoro modified nucleotide
  modified_base 6: mod_base = OTHER; note = 2'-O-methyl modified nucleotide
  modified_base 7: mod_base = OTHER; note = 2'-fluoro modified nucleotide
  modified_base 8: mod_base = OTHER; note = 2'-O-methyl modified nucleotide
  modified_base 9: mod_base = OTHER; note = 2'-fluoro modified nucleotide
  modified_base 10: mod_base = OTHER; note = 2'-O-methyl modified nucleotide
  modified_base 11: mod_base = OTHER; note = 2'-fluoro modified nucleotide
  modified_base 12: mod_base = OTHER; note = 2'-O-methyl modified nucleotide
  modified_base 13: mod_base = OTHER; note = 2'-fluoro modified nucleotide with phosphorothioate linkage
  modified_base 14: mod_base = OTHER; note = 2'-O-methyl modified nucleotide with phosphorothioate linkage
  modified_base 15: mod_base = OTHER; note = 2'-fluoro trivalent N-acetylgalactosamine modified nucleotide
ctttatattgctgta

SEQ ID NO: 1905 - RNA, 15 nt, synthetic construct
  source 1..15: mol_type = other RNA
  modified_base 1: mod_base = OTHER; note = 2'-fluoro modified nucleotide with phosphorothioate linkage
  modified_base 2: mod_base = OTHER; note = 2'-O-methyl modified nucleotide with phosphorothioate linkage
  modified_base 3: mod_base = OTHER; note = 2'-fluoro modified nucleotide
  modified_base 4: mod_base = OTHER; note = 2'-O-methyl modified nucleotide
  modified_base 5: mod_base = OTHER; note = 2'-fluoro modified nucleotide
  modified_base 6: mod_base = OTHER; note = 2'-O-methyl modified nucleotide
  modified_base 7: mod_base = OTHER; note = 2'-fluoro modified nucleotide
  modified_base 8: mod_base = OTHER; note = 2'-O-methyl modified nucleotide
  modified_base 9: mod_base = OTHER; note = 2'-fluoro modified nucleotide
  modified_base 10: mod_base = OTHER; note = 2'-O-methyl modified nucleotide
  modified_base 11: mod_base = OTHER; note = 2'-fluoro modified nucleotide
  modified_base 12: mod_base = OTHER; note = 2'-O-methyl modified nucleotide
  modified_base 13: mod_base = OTHER; note = 2'-fluoro modified nucleotide with phosphorothioate linkage
  modified_base 14: mod_base = OTHER; note = 2'-O-methyl modified nucleotide with phosphorothioate linkage
  modified_base 15: mod_base = OTHER; note = 2'-fluoro trivalent N-acetylgalactosamine modified nucleotide
taacctatgacaata

SEQ ID NO: 1906 - RNA, 15 nt, synthetic construct
  source 1..15: mol_type = other RNA
  modified_base 1: mod_base = OTHER; note = 2'-fluoro modified nucleotide with phosphorothioate linkage
  modified_base 2: mod_base = OTHER; note = 2'-O-methyl modified nucleotide with phosphorothioate linkage
  modified_base 3: mod_base = OTHER; note = 2'-fluoro modified nucleotide
  modified_base 4: mod_base = OTHER; note = 2'-O-methyl modified nucleotide
  modified_base 5: mod_base = OTHER; note = 2'-fluoro modified nucleotide
  modified_base 6: mod_base = OTHER; note = 2'-O-methyl modified nucleotide
  modified_base 7: mod_base = OTHER; note = 2'-fluoro modified nucleotide
  modified_base 8: mod_base = OTHER; note = 2'-O-methyl modified nucleotide
  modified_base 9: mod_base = OTHER; note = 2'-fluoro modified nucleotide
  modified_base 10: mod_base = OTHER; note = 2'-O-methyl modified nucleotide
  modified_base 11: mod_base = OTHER; note = 2'-fluoro modified nucleotide
  modified_base 12: mod_base = OTHER; note = 2'-O-methyl modified nucleotide
  modified_base 13: mod_base = OTHER; note = 2'-fluoro modified nucleotide with phosphorothioate linkage
  modified_base 14: mod_base = OTHER; note = 2'-O-methyl modified nucleotide with phosphorothioate linkage
  modified_base 15: mod_base = OTHER; note = 2'-fluoro trivalent N-acetylgalactosamine modified nucleotide
tgacaaaataactca

SEQ ID NO: 1907 - RNA, 15 nt, synthetic construct
  source 1..15: mol_type = other RNA
  modified_base 1: mod_base = OTHER; note = 2'-fluoro modified nucleotide with phosphorothioate linkage
  modified_base 2: mod_base = OTHER; note = 2'-O-methyl modified nucleotide with phosphorothioate linkage
  modified_base 3: mod_base = OTHER; note = 2'-fluoro modified nucleotide
  modified_base 4: mod_base = OTHER; note = 2'-O-methyl modified nucleotide
  modified_base 5: mod_base = OTHER; note = 2'-fluoro modified nucleotide
  modified_base 6: mod_base = OTHER; note = 2'-O-methyl modified nucleotide
  modified_base 7: mod_base = OTHER; note = 2'-fluoro modified nucleotide
  modified_base 8: mod_base = OTHER; note = 2'-O-methyl modified nucleotide
  modified_base 9: mod_base = OTHER; note = 2'-fluoro modified nucleotide
  modified_base 10: mod_base = OTHER; note = 2'-O-methyl modified nucleotide
  modified_base 11: mod_base = OTHER; note = 2'-fluoro modified nucleotide
  modified_base 12: mod_base = OTHER; note = 2'-O-methyl modified nucleotide
  modified_base 13: mod_base = OTHER; note = 2'-fluoro modified nucleotide with phosphorothioate linkage
  modified_base 14: mod_base = OTHER; note = 2'-O-methyl modified nucleotide with phosphorothioate linkage
  modified_base 15: mod_base = OTHER; note = 2'-fluoro trivalent N-acetylgalactosamine modified nucleotide
acaaaataactcaca

SEQ ID NO: 1908 - RNA, 15 nt, synthetic construct
  source 1..15: mol_type = other RNA
  modified_base 1: mod_base = OTHER; note = 2'-fluoro modified nucleotide with phosphorothioate linkage
  modified_base 2: mod_base = OTHER; note = 2'-O-methyl modified nucleotide with phosphorothioate linkage
  modified_base 3: mod_base = OTHER; note = 2'-fluoro modified nucleotide
  modified_base 4: mod_base = OTHER; note = 2'-O-methyl modified nucleotide
  modified_base 5: mod_base = OTHER; note = 2'-fluoro modified nucleotide
  modified_base 6: mod_base = OTHER; note = 2'-O-methyl modified nucleotide
  modified_base 7: mod_base = OTHER; note = 2'-fluoro modified nucleotide
  modified_base 8: mod_base = OTHER; note = 2'-O-methyl modified nucleotide
  modified_base 9: mod_base = OTHER; note = 2'-fluoro modified nucleotide
  modified_base 10: mod_base = OTHER; note = 2'-O-methyl modified nucleotide
  modified_base 11: mod_base = OTHER; note = 2'-fluoro modified nucleotide
  modified_base 12: mod_base = OTHER; note = 2'-O-methyl modified nucleotide
  modified_base 13: mod_base = OTHER; note = 2'-fluoro modified nucleotide with phosphorothioate linkage
  modified_base 14: mod_base = OTHER; note = 2'-O-methyl modified nucleotide with phosphorothioate linkage
  modified_base 15: mod_base = OTHER; note = 2'-fluoro trivalent N-acetylgalactosamine modified nucleotide
gacaaaataactcaa

SEQ ID NO: 1909 - RNA, 15 nt, synthetic construct
  source 1..15: mol_type = other RNA
  modified_base 1: mod_base = OTHER; note = 2'-fluoro modified nucleotide with phosphorothioate linkage
  modified_base 2: mod_base = OTHER; note = 2'-O-methyl modified nucleotide with phosphorothioate linkage
  modified_base 3: mod_base = OTHER; note = 2'-fluoro modified nucleotide
  modified_base 4: mod_base = OTHER; note = 2'-O-methyl modified nucleotide
  modified_base 5: mod_base = OTHER; note = 2'-fluoro modified nucleotide
  modified_base 6: mod_base = OTHER; note = 2'-O-methyl modified nucleotide
  modified_base 7: mod_base = OTHER; note = 2'-fluoro modified nucleotide
  modified_base 8: mod_base = OTHER; note = 2'-O-methyl modified nucleotide
  modified_base 9: mod_base = OTHER; note = 2'-fluoro modified nucleotide
  modified_base 10: mod_base = OTHER; note = 2'-O-methyl modified nucleotide
  modified_base 11: mod_base = OTHER; note = 2'-fluoro modified nucleotide
  modified_base 12: mod_base = OTHER; note = 2'-O-methyl modified nucleotide
  modified_base 13: mod_base = OTHER; note = 2'-fluoro modified nucleotide with phosphorothioate linkage
  modified_base 14: mod_base = OTHER; note = 2'-O-methyl modified nucleotide with phosphorothioate linkage
  modified_base 15: mod_base = OTHER; note = 2'-fluoro trivalent N-acetylgalactosamine modified nucleotide
tttcaaggaaaatta

SEQ ID NO: 1910 - RNA, 15 nt, synthetic construct
  source 1..15: mol_type = other RNA
  modified_base 1: mod_base = OTHER; note = 2'-fluoro modified nucleotide with phosphorothioate linkage
  modified_base 2: mod_base = OTHER; note = 2'-O-methyl modified nucleotide with phosphorothioate linkage
  modified_base 3: mod_base = OTHER; note = 2'-fluoro modified nucleotide
  modified_base 4: mod_base = OTHER; note = 2'-O-methyl modified nucleotide
  modified_base 5: mod_base = OTHER; note = 2'-fluoro modified nucleotide
  modified_base 6: mod_base = OTHER; note = 2'-O-methyl modified nucleotide
  modified_base 7: mod_base = OTHER; note = 2'-fluoro modified nucleotide
  modified_base 8: mod_base = OTHER; note = 2'-O-methyl modified nucleotide
  modified_base 9: mod_base = OTHER; note = 2'-fluoro modified nucleotide
  modified_base 10: mod_base = OTHER; note = 2'-O-methyl modified nucleotide
  modified_base 11: mod_base = OTHER; note = 2'-fluoro modified nucleotide
  modified_base 12: mod_base = OTHER; note = 2'-O-methyl modified nucleotide
  modified_base 13: mod_base = OTHER; note = 2'-fluoro modified nucleotide with phosphorothioate linkage
  modified_base 14: mod_base = OTHER; note = 2'-O-methyl modified nucleotide with phosphorothioate linkage
  modified_base 15: mod_base = OTHER; note = 2'-fluoro trivalent N-acetylgalactosamine modified nucleotide
tattgctgtaacaga

SEQ ID NO: 1911 - RNA, 15 nt, synthetic construct
  source 1..15: mol_type = other RNA
  modified_base 1: mod_base = OTHER; note = 2'-fluoro modified nucleotide with phosphorothioate linkage
  modified_base 2: mod_base = OTHER; note = 2'-O-methyl modified nucleotide with phosphorothioate linkage
  modified_base 3: mod_base = OTHER; note = 2'-fluoro modified nucleotide
  modified_base 4: mod_base = OTHER; note = 2'-O-methyl modified nucleotide
  modified_base 5: mod_base = OTHER; note = 2'-fluoro modified nucleotide
  modified_base 6: mod_base = OTHER; note = 2'-O-methyl modified nucleotide
  modified_base 7: mod_base = OTHER; note = 2'-fluoro modified nucleotide
  modified_base 8: mod_base = OTHER; note = 2'-O-methyl modified nucleotide
  modified_base 9: mod_base = OTHER; note = 2'-fluoro modified nucleotide
  modified_base 10: mod_base = OTHER; note = 2'-O-methyl modified nucleotide
  modified_base 11: mod_base = OTHER; note = 2'-fluoro modified nucleotide
  modified_base 12: mod_base = OTHER; note = 2'-O-methyl modified nucleotide
  modified_base 13: mod_base = OTHER; note = 2'-fluoro modified nucleotide with phosphorothioate linkage
  modified_base 14: mod_base = OTHER; note = 2'-O-methyl modified nucleotide with phosphorothioate linkage
  modified_base 15: mod_base = OTHER; note = 2'-fluoro trivalent N-acetylgalactosamine modified nucleotide
tatgacaatggatta

SEQ ID NO: 1912 - RNA, 15 nt, synthetic construct
  source 1..15: mol_type = other RNA
  modified_base 1: mod_base = OTHER; note = 2'-fluoro modified nucleotide with phosphorothioate linkage
  modified_base 2: mod_base = OTHER; note = 2'-O-methyl modified nucleotide with phosphorothioate linkage
  modified_base 3: mod_base = OTHER; note = 2'-fluoro modified nucleotide
  modified_base 4: mod_base = OTHER; note = 2'-O-methyl modified nucleotide
  modified_base 5: mod_base = OTHER; note = 2'-fluoro modified nucleotide
  modified_base 6: mod_base = OTHER; note = 2'-O-methyl modified nucleotide
  modified_base 7: mod_base = OTHER; note = 2'-fluoro modified nucleotide
  modified_base 8: mod_base = OTHER; note = 2'-O-methyl modified nucleotide
  modified_base 9: mod_base = OTHER; note = 2'-fluoro modified nucleotide
  modified_base 10: mod_base = OTHER; note = 2'-O-methyl modified nucleotide
  modified_base 11: mod_base = OTHER; note = 2'-fluoro modified nucleotide
  modified_base 12: mod_base = OTHER; note = 2'-O-methyl modified nucleotide
  modified_base 13: mod_base = OTHER; note = 2'-fluoro modified nucleotide with phosphorothioate linkage
  modified_base 14: mod_base = OTHER; note = 2'-O-methyl modified nucleotide with phosphorothioate linkage
  modified_base 15: mod_base = OTHER; note = 2'-fluoro trivalent N-acetylgalactosamine modified nucleotide
ctatgacaatggata

SEQ ID NO: 1913 - RNA, 15 nt, synthetic construct
  source 1..15: mol_type = other RNA
  modified_base 1: mod_base = OTHER; note = 2'-fluoro modified nucleotide with phosphorothioate linkage
  modified_base 2: mod_base = OTHER; note = 2'-O-methyl modified nucleotide with phosphorothioate linkage
  modified_base 3: mod_base = OTHER; note = 2'-fluoro modified nucleotide
  modified_base 4: mod_base = OTHER; note = 2'-O-methyl modified nucleotide
  modified_base 5: mod_base = OTHER; note = 2'-fluoro modified nucleotide
  modified_base 6: mod_base = OTHER; note = 2'-O-methyl modified nucleotide
  modified_base 7: mod_base = OTHER; note = 2'-fluoro modified nucleotide
  modified_base 8: mod_base = OTHER; note = 2'-O-methyl modified nucleotide
  modified_base 9: mod_base = OTHER; note = 2'-fluoro modified nucleotide
  modified_base 10: mod_base = OTHER; note = 2'-O-methyl modified nucleotide
  modified_base 11: mod_base = OTHER; note = 2'-fluoro modified nucleotide
  modified_base 12: mod_base = OTHER; note = 2'-O-methyl modified nucleotide
  modified_base 13: mod_base = OTHER; note = 2'-fluoro modified nucleotide with phosphorothioate linkage
  modified_base 14: mod_base = OTHER; note = 2'-O-methyl modified nucleotide with phosphorothioate linkage
  modified_base 15: mod_base = OTHER; note = 2'-fluoro trivalent N-acetylgalactosamine modified nucleotide
gacaatggatttcta

SEQ ID NO: 1914 - RNA, 15 nt, synthetic construct
  source 1..15: mol_type = other RNA
  modified_base 1: mod_base = OTHER; note = 2'-fluoro modified nucleotide with phosphorothioate linkage
  modified_base 2: mod_base = OTHER; note = 2'-O-methyl modified nucleotide with phosphorothioate linkage
  modified_base 3: mod_base = OTHER; note = 2'-fluoro modified nucleotide
  modified_base 4: mod_base = OTHER; note = 2'-O-methyl modified nucleotide
  modified_base 5: mod_base = OTHER; note = 2'-fluoro modified nucleotide
  modified_base 6: mod_base = OTHER; note = 2'-O-methyl modified nucleotide
  modified_base 7: mod_base = OTHER; note = 2'-fluoro modified nucleotide
  modified_base 8: mod_base = OTHER; note = 2'-O-methyl modified nucleotide
  modified_base 9: mod_base = OTHER; note = 2'-fluoro modified nucleotide
  modified_base 10: mod_base = OTHER; note = 2'-O-methyl modified nucleotide
  modified_base 11: mod_base = OTHER; note = 2'-fluoro modified nucleotide
  modified_base 12: mod_base = OTHER; note = 2'-O-methyl modified nucleotide
  modified_base 13: mod_base = OTHER; note = 2'-fluoro modified nucleotide with phosphorothioate linkage
  modified_base 14: mod_base = OTHER; note = 2'-O-methyl modified nucleotide with phosphorothioate linkage
  modified_base 15: mod_base = OTHER; note = 2'-fluoro trivalent N-acetylgalactosamine modified nucleotide
taaagaatatgtcta

SEQ ID NO: 1915 - RNA, 15 nt, synthetic construct
  source 1..15: mol_type = other RNA
  modified_base 1: mod_base = OTHER; note = 2'-fluoro modified nucleotide with phosphorothioate linkage
  modified_base 2: mod_base = OTHER; note = 2'-O-methyl modified nucleotide with phosphorothioate linkage
  modified_base 3: mod_base = OTHER; note = 2'-fluoro modified nucleotide
  modified_base 4: mod_base = OTHER; note = 2'-O-methyl modified nucleotide
  modified_base 5: mod_base = OTHER; note = 2'-fluoro modified nucleotide
  modified_base 6: mod_base = OTHER; note = 2'-O-methyl modified nucleotide
  modified_base 7: mod_base = OTHER; note = 2'-fluoro modified nucleotide
  modified_base 8: mod_base = OTHER; note = 2'-O-methyl modified nucleotide
  modified_base 9: mod_base = OTHER; note = 2'-fluoro modified nucleotide
  modified_base 10: mod_base = OTHER; note = 2'-O-methyl modified nucleotide
  modified_base 11: mod_base = OTHER; note = 2'-fluoro modified nucleotide
  modified_base 12: mod_base = OTHER; note = 2'-O-methyl modified nucleotide
  modified_base 13: mod_base = OTHER; note = 2'-fluoro modified nucleotide with phosphorothioate linkage
  modified_base 14: mod_base = OTHER; note = 2'-O-methyl modified nucleotide with phosphorothioate linkage
  modified_base 15: mod_base = OTHER; note = 2'-fluoro trivalent N-acetylgalactosamine modified nucleotide
agggaatctgcacta

SEQ ID NO: 1916 - RNA, 15 nt, synthetic construct
  source 1..15: mol_type = other RNA
  modified_base 1: mod_base = OTHER; note = 2'-fluoro modified nucleotide with phosphorothioate linkage
  modified_base 2: mod_base = OTHER; note = 2'-O-methyl modified nucleotide with phosphorothioate linkage
  modified_base 3: mod_base = OTHER; note = 2'-fluoro modified nucleotide
  modified_base 4: mod_base = OTHER; note = 2'-O-methyl modified nucleotide
  modified_base 5: mod_base = OTHER; note = 2'-fluoro modified nucleotide
  modified_base 6: mod_base = OTHER; note = 2'-O-methyl modified nucleotide
  modified_base 7: mod_base = OTHER; note = 2'-fluoro modified nucleotide
  modified_base 8: mod_base = OTHER; note = 2'-O-methyl modified nucleotide
  modified_base 9: mod_base = OTHER; note = 2'-fluoro modified nucleotide
  modified_base 10: mod_base = OTHER; note = 2'-O-methyl modified nucleotide
  modified_base 11: mod_base = OTHER; note = 2'-fluoro modified nucleotide
  modified_base 12: mod_base = OTHER; note = 2'-O-methyl modified nucleotide
  modified_base 13: mod_base = OTHER; note = 2'-fluoro modified nucleotide with phosphorothioate linkage
  modified_base 14: mod_base = OTHER; note = 2'-O-methyl modified nucleotide with phosphorothioate linkage
  modified_base 15: mod_base = OTHER; note = 2'-fluoro trivalent N-acetylgalactosamine modified nucleotide
cctatgacaatggaa

SEQ ID NO: 1917 - RNA, 15 nt, synthetic construct
  source 1..15: mol_type = other RNA
  modified_base 1: mod_base = OTHER; note = 2'-fluoro modified nucleotide with phosphorothioate linkage
  modified_base 2: mod_base = OTHER; note = 2'-O-methyl modified nucleotide with phosphorothioate linkage
  modified_base 3: mod_base = OTHER; note = 2'-fluoro modified nucleotide
  modified_base 4: mod_base = OTHER; note = 2'-O-methyl modified nucleotide
  modified_base 5: mod_base = OTHER; note = 2'-fluoro modified nucleotide
  modified_base 6: mod_base = OTHER; note = 2'-O-methyl modified nucleotide
  modified_base 7: mod_base = OTHER; note = 2'-fluoro modified nucleotide
  modified_base 8: mod_base = OTHER; note = 2'-O-methyl modified nucleotide
  modified_base 9: mod_base = OTHER; note = 2'-fluoro modified nucleotide
  modified_base 10: mod_base = OTHER; note = 2'-O-methyl modified nucleotide
  modified_base 11: mod_base = OTHER; note = 2'-fluoro modified nucleotide
  modified_base 12: mod_base = OTHER; note = 2'-O-methyl modified nucleotide
  modified_base 13: mod_base = OTHER; note = 2'-fluoro modified nucleotide with phosphorothioate linkage
  modified_base 14: mod_base = OTHER; note = 2'-O-methyl modified nucleotide with phosphorothioate linkage
  modified_base 15: mod_base = OTHER; note = 2'-fluoro trivalent N-acetylgalactosamine modified nucleotide
tgttcaaagatgtca

SEQ ID NO: 1918 - RNA, 15 nt, synthetic construct
  source 1..15: mol_type = other RNA
  modified_base 1: mod_base = OTHER; note = 2'-fluoro modified nucleotide with phosphorothioate linkage
  modified_base 2: mod_base = OTHER; note = 2'-O-methyl modified nucleotide with phosphorothioate linkage
  modified_base 3: mod_base = OTHER; note = 2'-fluoro modified nucleotide
  modified_base 4: mod_base = OTHER; note = 2'-O-methyl modified nucleotide
  modified_base 5: mod_base = OTHER; note = 2'-fluoro modified nucleotide
  modified_base 6: mod_base = OTHER; note = 2'-O-methyl modified nucleotide
  modified_base 7: mod_base = OTHER; note = 2'-fluoro modified nucleotide
  modified_base 8: mod_base = OTHER; note = 2'-O-methyl modified nucleotide
  modified_base 9: mod_base = OTHER; note = 2'-fluoro modified nucleotide
  modified_base 10: mod_base = OTHER; note = 2'-O-methyl modified nucleotide
  modified_base 11: mod_base = OTHER; note = 2'-fluoro modified nucleotide
  modified_base 12: mod_base = OTHER; note = 2'-O-methyl modified nucleotide
  modified_base 13: mod_base = OTHER; note = 2'-fluoro modified nucleotide with phosphorothioate linkage
  modified_base 14: mod_base = OTHER; note = 2'-O-methyl modified nucleotide with phosphorothioate linkage
  modified_base 15: mod_base = OTHER; note = 2'-fluoro trivalent N-acetylgalactosamine modified nucleotide
aacctatgacaatga

SEQ ID NO: 1919 - RNA, 15 nt, synthetic construct
  source 1..15: mol_type = other RNA
  modified_base 1: mod_base = OTHER; note = 2'-fluoro modified nucleotide with phosphorothioate linkage
  modified_base 2: mod_base = OTHER; note = 2'-O-methyl modified nucleotide with phosphorothioate linkage
  modified_base 3: mod_base = OTHER; note = 2'-fluoro modified nucleotide
  modified_base 4: mod_base = OTHER; note = 2'-O-methyl modified nucleotide
  modified_base 5: mod_base = OTHER; note = 2'-fluoro modified nucleotide
  modified_base 6: mod_base = OTHER; note = 2'-O-methyl modified nucleotide
  modified_base 7: mod_base = OTHER; note = 2'-fluoro modified nucleotide
  modified_base 8: mod_base = OTHER; note = 2'-O-methyl modified nucleotide
  modified_base 9: mod_base = OTHER; note = 2'-fluoro modified nucleotide
  modified_base 10: mod_base = OTHER; note = 2'-O-methyl modified nucleotide
  modified_base 11: mod_base = OTHER; note = 2'-fluoro modified nucleotide
  modified_base 12: mod_base = OTHER; note = 2'-O-methyl modified nucleotide
  modified_base 13: mod_base = OTHER; note = 2'-fluoro modified nucleotide with phosphorothioate linkage
  modified_base 14: mod_base = OTHER; note = 2'-O-methyl modified nucleotide with phosphorothioate linkage
  modified_base 15: mod_base = OTHER; note = 2'-fluoro trivalent N-acetylgalactosamine modified nucleotide
atggatttctcttca

SEQ ID NO: 1920 - RNA, 15 nt, synthetic construct
  source 1..15: mol_type = other RNA
  modified_base 1: mod_base = OTHER; note = 2'-fluoro modified nucleotide with phosphorothioate linkage
  modified_base 2: mod_base = OTHER; note = 2'-O-methyl modified nucleotide with phosphorothioate linkage
  modified_base 3: mod_base = OTHER; note = 2'-fluoro modified nucleotide
  modified_base 4: mod_base = OTHER; note = 2'-O-methyl modified nucleotide
  modified_base 5: mod_base = OTHER; note = 2'-fluoro modified nucleotide
  modified_base 6: mod_base = OTHER; note = 2'-O-methyl modified nucleotide
  modified_base 7: mod_base = OTHER; note = 2'-fluoro modified nucleotide
  modified_base 8: mod_base = OTHER; note = 2'-O-methyl modified nucleotide
  modified_base 9: mod_base = OTHER; note = 2'-fluoro modified nucleotide
  modified_base 10: mod_base = OTHER; note = 2'-O-methyl modified nucleotide
  modified_base 11: mod_base = OTHER; note = 2'-fluoro modified nucleotide
  modified_base 12: mod_base = OTHER; note = 2'-O-methyl modified nucleotide
  modified_base 13: mod_base = OTHER; note = 2'-fluoro modified nucleotide with phosphorothioate linkage
  modified_base 14: mod_base = OTHER; note = 2'-O-methyl modified nucleotide with phosphorothioate linkage
  modified_base 15: mod_base = OTHER; note = 2'-fluoro trivalent N-acetylgalactosamine modified nucleotide
gttaaagaatatgta

SEQ ID NO: 1921 - RNA, 15 nt, synthetic construct
  source 1..15: mol_type = other RNA
  modified_base 1: mod_base = OTHER; note = 2'-fluoro modified nucleotide with phosphorothioate linkage
  modified_base 2: mod_base = OTHER; note = 2'-O-methyl modified nucleotide with phosphorothioate linkage
  modified_base 3: mod_base = OTHER; note = 2'-fluoro modified nucleotide
  modified_base 4: mod_base = OTHER; note = 2'-O-methyl modified nucleotide
  modified_base 5: mod_base = OTHER; note = 2'-fluoro modified nucleotide
  modified_base 6: mod_base = OTHER; note = 2'-O-methyl modified nucleotide
  modified_base 7: mod_base = OTHER; note = 2'-fluoro modified nucleotide
  modified_base 8: mod_base = OTHER; note = 2'-O-methyl modified nucleotide
  modified_base 9: mod_base = OTHER; note = 2'-fluoro modified nucleotide
  modified_base 10: mod_base = OTHER; note = 2'-O-methyl modified nucleotide
  modified_base 11: mod_base = OTHER; note = 2'-fluoro modified nucleotide
  modified_base 12: mod_base = OTHER; note = 2'-O-methyl modified nucleotide
  modified_base 13: mod_base = OTHER; note = 2'-fluoro modified nucleotide with phosphorothioate linkage
  modified_base 14: mod_base = OTHER; note = 2'-O-methyl modified nucleotide with phosphorothioate linkage
  modified_base 15: mod_base = OTHER; note = 2'-fluoro trivalent N-acetylgalactosamine modified nucleotide
agtgtaaaaggacta

SEQ ID NO: 1922 - RNA, 15 nt, synthetic construct
  source 1..15: mol_type = other RNA
  modified_base 1: mod_base = OTHER; note = 2'-fluoro modified nucleotide with phosphorothioate linkage
  modified_base 2: mod_base = OTHER; note = 2'-O-methyl modified nucleotide with phosphorothioate linkage
  modified_base 3: mod_base = OTHER; note = 2'-fluoro modified nucleotide
  modified_base 4: mod_base = OTHER; note = 2'-O-methyl modified nucleotide
  modified_base 5: mod_base = OTHER; note = 2'-fluoro modified nucleotide
  modified_base 6: mod_base = OTHER; note = 2'-O-methyl modified nucleotide
  modified_base 7: mod_base = OTHER; note = 2'-fluoro modified nucleotide
  modified_base 8: mod_base = OTHER; note = 2'-O-methyl modified nucleotide
  modified_base 9: mod_base = OTHER; note = 2'-fluoro modified nucleotide
  modified_base 10: mod_base = OTHER; note = 2'-O-methyl modified nucleotide
  modified_base 11: mod_base = OTHER; note = 2'-fluoro modified nucleotide
  modified_base 12: mod_base = OTHER; note = 2'-O-methyl modified nucleotide
  modified_base 13: mod_base = OTHER; note = 2'-fluoro modified nucleotide with phosphorothioate linkage
  modified_base 14: mod_base = OTHER; note = 2'-O-methyl modified nucleotide with phosphorothioate linkage
  modified_base 15: mod_base = OTHER; note = 2'-fluoro trivalent N-acetylgalactosamine modified nucleotide
ctttcaaggaaaata

SEQ ID NO: 1923 - RNA, 15 nt, synthetic construct
  source 1..15: mol_type = other RNA
  modified_base 1: mod_base = OTHER; note = 2'-fluoro modified nucleotide with phosphorothioate linkage
  modified_base 2: mod_base = OTHER; note = 2'-O-methyl modified nucleotide with phosphorothioate linkage
  modified_base 3: mod_base = OTHER; note = 2'-fluoro modified nucleotide
  modified_base 4: mod_base = OTHER; note = 2'-O-methyl modified nucleotide
  modified_base 5: mod_base = OTHER; note = 2'-fluoro modified nucleotide
  modified_base 6: mod_base = OTHER; note = 2'-O-methyl modified nucleotide
  modified_base 7: mod_base = OTHER; note = 2'-fluoro modified nucleotide
  modified_base 8: mod_base = OTHER; note = 2'-O-methyl modified nucleotide
  modified_base 9: mod_base = OTHER; note = 2'-fluoro modified nucleotide
  modified_base 10: mod_base = OTHER; note = 2'-O-methyl modified nucleotide
  modified_base 11: mod_base = OTHER; note = 2'-fluoro modified nucleotide
  modified_base 12: mod_base = OTHER; note = 2'-O-methyl modified nucleotide
  modified_base 13: mod_base = OTHER; note = 2'-fluoro modified nucleotide with phosphorothioate linkage
  modified_base 14: mod_base = OTHER; note = 2'-O-methyl modified nucleotide with phosphorothioate linkage
  modified_base 15: mod_base = OTHER; note = 2'-fluoro trivalent N-acetylgalactosamine modified nucleotide
taaaatacaatttca

SEQ ID NO: 1924 - RNA, 15 nt, synthetic construct
  source 1..15: mol_type = other RNA
  modified_base 1: mod_base = OTHER; note = 2'-fluoro modified nucleotide with phosphorothioate linkage
  modified_base 2: mod_base = OTHER; note = 2'-O-methyl modified nucleotide with phosphorothioate linkage
  modified_base 3: mod_base = OTHER; note = 2'-fluoro modified nucleotide
  modified_base 4: mod_base = OTHER; note = 2'-O-methyl modified nucleotide
  modified_base 5: mod_base = OTHER; note = 2'-fluoro modified nucleotide
  modified_base 6: mod_base = OTHER; note = 2'-O-methyl modified nucleotide
  modified_base 7: mod_base = OTHER; note = 2'-fluoro modified nucleotide
  modified_base 8: mod_base = OTHER; note = 2'-O-methyl modified nucleotide
  modified_base 9: mod_base = OTHER; note = 2'-fluoro modified nucleotide
  modified_base 10: mod_base = OTHER; note = 2'-O-methyl modified nucleotide
  modified_base 11: mod_base = OTHER; note = 2'-fluoro modified nucleotide
  modified_base 12: mod_base = OTHER; note = 2'-O-methyl modified nucleotide
  modified_base 13: mod_base = OTHER; note = 2'-fluoro modified nucleotide with phosphorothioate linkage
  modified_base 14: mod_base = OTHER; note = 2'-O-methyl modified nucleotide with phosphorothioate linkage
  modified_base 15: mod_base = OTHER; note = 2'-fluoro trivalent N-acetylgalactosamine modified nucleotide
aattttgaaattaca

SEQ ID NO: 1925 - RNA, 15 nt, synthetic construct
  source 1..15: mol_type = other RNA
  modified_base 1: mod_base = OTHER; note = 2'-fluoro modified nucleotide with phosphorothioate linkage
  modified_base 2: mod_base = OTHER; note = 2'-O-methyl modified nucleotide with phosphorothioate linkage
  modified_base 3: mod_base = OTHER; note = 2'-fluoro modified nucleotide
  modified_base 4: mod_base = OTHER; note = 2'-O-methyl modified nucleotide
  modified_base 5: mod_base = OTHER; note = 2'-fluoro modified nucleotide
  modified_base 6: mod_base = OTHER; note = 2'-O-methyl modified nucleotide
  modified_base 7: mod_base = OTHER; note = 2'-fluoro modified nucleotide
  modified_base 8: mod_base = OTHER; note = 2'-O-methyl modified nucleotide
  modified_base 9: mod_base = OTHER; note = 2'-fluoro modified nucleotide
  modified_base 10: mod_base = OTHER; note = 2'-O-methyl modified nucleotide
  modified_base 11: mod_base = OTHER; note = 2'-fluoro modified nucleotide
  modified_base 12: mod_base = OTHER; note = 2'-O-methyl modified nucleotide
  modified_base 13: mod_base = OTHER; note = 2'-fluoro modified nucleotide with phosphorothioate linkage
  modified_base 14: mod_base = OTHER; note = 2'-O-methyl modified nucleotide with phosphorothioate linkage
  modified_base 15: mod_base = OTHER; note = 2'-fluoro trivalent N-acetylgalactosamine modified nucleotide
actttaagaatttta

SEQ ID NO: 1926 - RNA, 15 nt, synthetic construct
  source 1..15: mol_type = other RNA
  modified_base 1: mod_base = OTHER; note = 2'-fluoro modified nucleotide with phosphorothioate linkage
  modified_base 2: mod_base = OTHER; note = 2'-O-methyl modified nucleotide with phosphorothioate linkage
  modified_base 3: mod_base = OTHER; note = 2'-fluoro modified nucleotide
  modified_base 4: mod_base = OTHER; note = 2'-O-methyl modified nucleotide
  modified_base 5: mod_base = OTHER; note = 2'-fluoro modified nucleotide
  modified_base 6: mod_base = OTHER; note = 2'-O-methyl modified nucleotide
  modified_base 7: mod_base = OTHER; note = 2'-fluoro modified nucleotide
  modified_base 8: mod_base = OTHER; note = 2'-O-methyl modified nucleotide
  modified_base 9: mod_base = OTHER; note = 2'-fluoro modified nucleotide
  modified_base 10: mod_base = OTHER; note = 2'-O-methyl modified nucleotide
  modified_base 11: mod_base = OTHER; note = 2'-fluoro modified nucleotide
  modified_base 12: mod_base = OTHER; note = 2'-O-methyl modified nucleotide
  modified_base 13: mod_base = OTHER; note = 2'-fluoro modified nucleotide with phosphorothioate linkage
  modified_base 14: mod_base = OTHER; note = 2'-O-methyl modified nucleotide with phosphorothioate linkage
  modified_base 15: mod_base = OTHER; note = 2'-fluoro trivalent N-acetylgalactosamine modified nucleotide
cagaaccaaaattca

SEQ ID NO: 1927 - RNA, 15 nt, synthetic construct
  source 1..15: mol_type = other RNA
  modified_base 1: mod_base = OTHER; note = 2'-fluoro modified nucleotide with phosphorothioate linkage
  modified_base 2: mod_base = OTHER; note = 2'-O-methyl modified nucleotide with phosphorothioate linkage
  modified_base 3: mod_base = OTHER; note = 2'-fluoro modified nucleotide
  modified_base 4: mod_base = OTHER; note = 2'-O-methyl modified nucleotide
  modified_base 5: mod_base = OTHER; note = 2'-fluoro modified nucleotide
  modified_base 6: mod_base = OTHER; note = 2'-O-methyl modified nucleotide
  modified_base 7: mod_base = OTHER; note = 2'-fluoro modified nucleotide
  modified_base 8: mod_base = OTHER; note = 2'-O-methyl modified nucleotide
  modified_base 9: mod_base = OTHER; note = 2'-fluoro modified nucleotide
  modified_base 10: mod_base = OTHER; note = 2'-O-methyl modified nucleotide
  modified_base 11: mod_base = OTHER; note = 2'-fluoro modified nucleotide
  modified_base 12: mod_base = OTHER; note = 2'-O-methyl modified nucleotide
  modified_base 13: mod_base = OTHER; note = 2'-fluoro modified nucleotide with phosphorothioate linkage
  modified_base 14: mod_base = OTHER; note = 2'-O-methyl modified nucleotide with phosphorothioate linkage
  modified_base 15: mod_base = OTHER; note = 2'-fluoro trivalent N-acetylgalactosamine modified nucleotide
aattataaaatgaca

SEQ ID NO: 1928 - RNA, 15 nt, synthetic construct
  source 1..15: mol_type = other RNA
  modified_base 1: mod_base = OTHER; note = 2'-fluoro modified nucleotide with phosphorothioate linkage
  modified_base 2: mod_base = OTHER; note = 2'-O-methyl modified nucleotide with phosphorothioate linkage
  modified_base 3: mod_base = OTHER; note = 2'-fluoro modified nucleotide
  modified_base 4: mod_base = OTHER; note = 2'-O-methyl modified nucleotide
  modified_base 5: mod_base = OTHER; note = 2'-fluoro modified nucleotide
  modified_base 6: mod_base = OTHER; note = 2'-O-methyl modified nucleotide
  modified_base 7: mod_base = OTHER; note = 2'-fluoro modified nucleotide
  modified_base 8: mod_base = OTHER; note = 2'-O-methyl modified nucleotide
  modified_base 9: mod_base = OTHER; note = 2'-fluoro modified nucleotide
  modified_base 10: mod_base = OTHER; note = 2'-O-methyl modified nucleotide
  modified_base 11: mod_base = OTHER; note = 2'-fluoro modified nucleotide
  modified_base 12: mod_base = OTHER; note = 2'-O-methyl modified nucleotide
  modified_base 13: mod_base = OTHER; note = 2'-fluoro modified nucleotide with phosphorothioate linkage
  modified_base 14: mod_base = OTHER; note = 2'-O-methyl modified nucleotide with phosphorothioate linkage
  modified_base 15: mod_base = OTHER; note = 2'-fluoro trivalent N-acetylgalactosamine modified nucleotide
cagtacaggatttga

SEQ ID NO: 1929 - RNA, 15 nt, synthetic construct
  source 1..15: mol_type = other RNA
  modified_base 1: mod_base = OTHER; note = 2'-fluoro modified nucleotide with phosphorothioate linkage
  modified_base 2: mod_base = OTHER; note = 2'-O-methyl modified nucleotide with phosphorothioate linkage
  modified_base 3: mod_base = OTHER; note = 2'-fluoro modified nucleotide
  modified_base 4: mod_base = OTHER; note = 2'-O-methyl modified nucleotide
  modified_base 5: mod_base = OTHER; note = 2'-fluoro modified nucleotide
  modified_base 6: mod_base = OTHER; note = 2'-O-methyl modified nucleotide
  modified_base 7: mod_base = OTHER; note = 2'-fluoro modified nucleotide
  modified_base 8: mod_base = OTHER; note = 2'-O-methyl modified nucleotide
  modified_base 9: mod_base = OTHER; note = 2'-fluoro modified nucleotide
  modified_base 10: mod_base = OTHER; note = 2'-O-methyl modified nucleotide
  modified_base 11: mod_base = OTHER; note = 2'-fluoro modified nucleotide
  modified_base 12: mod_base = OTHER; note = 2'-O-methyl modified nucleotide
  modified_base 13: mod_base = OTHER; note = 2'-fluoro modified nucleotide with phosphorothioate linkage
  modified_base 14: mod_base = OTHER; note = 2'-O-methyl modified nucleotide with phosphorothioate linkage
  modified_base 15: mod_base = OTHER; note = 2'-fluoro trivalent N-acetylgalactosamine modified nucleotide
tattaaaagttatca

SEQ ID NO: 1930 - RNA, 15 nt, synthetic construct
  source 1..15: mol_type = other RNA
  modified_base 1: mod_base = OTHER; note = 2'-fluoro modified nucleotide with phosphorothioate linkage
  modified_base 2: mod_base = OTHER; note = 2'-O-methyl modified nucleotide with phosphorothioate linkage
  modified_base 3: mod_base = OTHER; note = 2'-fluoro modified nucleotide
  modified_base 4: mod_base = OTHER; note = 2'-O-methyl modified nucleotide
  modified_base 5: mod_base = OTHER; note = 2'-fluoro modified nucleotide
  modified_base 6: mod_base = OTHER; note = 2'-O-methyl modified nucleotide
  modified_base 7: mod_base = OTHER; note = 2'-fluoro modified nucleotide
  modified_base 8: mod_base = OTHER; note = 2'-O-methyl modified nucleotide
  modified_base 9: mod_base = OTHER; note = 2'-fluoro modified nucleotide
  modified_base 10: mod_base = OTHER; note = 2'-O-methyl modified nucleotide
  modified_base 11: mod_base = OTHER; note = 2'-fluoro modified nucleotide
  modified_base 12: mod_base = OTHER; note = 2'-O-methyl modified nucleotide
  modified_base 13: mod_base = OTHER; note = 2'-fluoro modified nucleotide with phosphorothioate linkage
  modified_base 14: mod_base = OTHER; note = 2'-O-methyl modified nucleotide with phosphorothioate linkage
  modified_base 15: mod_base = OTHER; note = 2'-fluoro trivalent N-acetylgalactosamine modified nucleotide
aagagaagacttaaa

SEQ ID NO: 1931 - RNA, 15 nt, synthetic construct
  source 1..15: mol_type = other RNA
  modified_base 1: mod_base = OTHER; note = 2'-fluoro modified nucleotide with phosphorothioate linkage
  modified_base 2: mod_base = OTHER; note = 2'-O-methyl modified nucleotide with phosphorothioate linkage
  modified_base 3: mod_base = OTHER; note = 2'-fluoro modified nucleotide
  modified_base 4: mod_base = OTHER; note = 2'-O-methyl modified nucleotide
  modified_base 5: mod_base = OTHER; note = 2'-fluoro modified nucleotide
  modified_base 6: mod_base = OTHER; note = 2'-O-methyl modified nucleotide
  modified_base 7: mod_base = OTHER; note = 2'-fluoro modified nucleotide
  modified_base 8: mod_base = OTHER; note = 2'-O-methyl modified nucleotide
  modified_base 9: mod_base = OTHER; note = 2'-fluoro modified nucleotide
  modified_base 10: mod_base = OTHER; note = 2'-O-methyl modified nucleotide
  modified_base 11: mod_base = OTHER; note = 2'-fluoro modified nucleotide
  modified_base 12: mod_base = OTHER; note = 2'-O-methyl modified nucleotide
  modified_base 13: mod_base = OTHER; note = 2'-fluoro modified nucleotide with phosphorothioate linkage
  modified_base 14: mod_base = OTHER; note = 2'-O-methyl modified nucleotide with phosphorothioate linkage
  modified_base 15: mod_base = OTHER; note = 2'-fluoro trivalent N-acetylgalactosamine modified nucleotide
catattggaattata

SEQ ID NO: 1932 - RNA, 15 nt, synthetic construct
  source 1..15: mol_type = other RNA
  modified_base 1: mod_base = OTHER; note = 2'-fluoro modified nucleotide with phosphorothioate linkage
  modified_base 2: mod_base = OTHER; note = 2'-O-methyl modified nucleotide with phosphorothioate linkage
  modified_base 3: mod_base = OTHER; note = 2'-fluoro modified nucleotide
  modified_base 4: mod_base = OTHER; note = 2'-O-methyl modified nucleotide
  modified_base 5: mod_base = OTHER; note = 2'-fluoro modified nucleotide
  modified_base 6: mod_base = OTHER; note = 2'-O-methyl modified nucleotide
  modified_base 7: mod_base = OTHER; note = 2'-fluoro modified nucleotide
  modified_base 8: mod_base = OTHER; note = 2'-O-methyl modified nucleotide
  modified_base 9: mod_base = OTHER; note = 2'-fluoro modified nucleotide
  modified_base 10: mod_base = OTHER; note = 2'-O-methyl modified nucleotide
  modified_base 11: mod_base = OTHER; note = 2'-fluoro modified nucleotide
  modified_base 12: mod_base = OTHER; note = 2'-O-methyl modified nucleotide
  modified_base 13: mod_base = OTHER; note = 2'-fluoro modified nucleotide with phosphorothioate linkage
  modified_base 14: mod_base = OTHER; note = 2'-O-methyl modified nucleotide with phosphorothioate linkage
  modified_base 15: mod_base = OTHER; note = 2'-fluoro trivalent N-acetylgalactosamine modified nucleotide
catgttcatttatca

SEQ ID NO: 1933 - RNA, 15 nt, synthetic construct
  source 1..15: mol_type = other RNA
  modified_base 1: mod_base = OTHER; note = 2'-fluoro modified nucleotide with phosphorothioate linkage
  modified_base 2: mod_base = OTHER; note = 2'-O-methyl modified nucleotide with phosphorothioate linkage
  modified_base 3: mod_base = OTHER; note = 2'-fluoro modified nucleotide
  modified_base 4: mod_base = OTHER; note = 2'-O-methyl modified nucleotide
  modified_base 5: mod_base = OTHER; note = 2'-fluoro modified nucleotide
  modified_base 6: mod_base = OTHER; note = 2'-O-methyl modified nucleotide
  modified_base 7: mod_base = OTHER; note = 2'-fluoro modified nucleotide
  modified_base 8: mod_base = OTHER; note = 2'-O-methyl modified nucleotide
  modified_base 9: mod_base = OTHER; note = 2'-fluoro modified nucleotide
  modified_base 10: mod_base = OTHER; note = 2'-O-methyl modified nucleotide
  modified_base 11: mod_base = OTHER; note = 2'-fluoro modified nucleotide
  modified_base 12: mod_base = OTHER; note = 2'-O-methyl modified nucleotide
  modified_base 13: mod_base = OTHER; note = 2'-fluoro modified nucleotide with phosphorothioate linkage
  modified_base 14: mod_base = OTHER; note = 2'-O-methyl modified nucleotide with phosphorothioate linkage
  modified_base 15: mod_base = OTHER; note = 2'-fluoro trivalent N-acetylgalactosamine modified nucleotide
aaatgatgaacctta

SEQ ID NO: 1934 - RNA, 15 nt, synthetic construct
  source 1..15: mol_type = other RNA
  modified_base 1: mod_base = OTHER; note = 2'-fluoro modified nucleotide with phosphorothioate linkage
  modified_base 2: mod_base = OTHER; note = 2'-O-methyl modified nucleotide with phosphorothioate linkage
  modified_base 3: mod_base = OTHER; note = 2'-fluoro modified nucleotide
  modified_base 4: mod_base = OTHER; note = 2'-O-methyl modified nucleotide
  modified_base 5: mod_base = OTHER; note = 2'-fluoro modified nucleotide
  modified_base 6: mod_base = OTHER; note = 2'-O-methyl modified nucleotide
  modified_base 7: mod_base = OTHER; note = 2'-fluoro modified nucleotide
  modified_base 8: mod_base = OTHER; note = 2'-O-methyl modified nucleotide
  modified_base 9: mod_base = OTHER; note = 2'-fluoro modified nucleotide
  modified_base 10: mod_base = OTHER; note = 2'-O-methyl modified nucleotide
  modified_base 11: mod_base = OTHER; note = 2'-fluoro modified nucleotide
  modified_base 12: mod_base = OTHER; note = 2'-O-methyl modified nucleotide
  modified_base 13: mod_base = OTHER; note = 2'-fluoro modified nucleotide with phosphorothioate linkage
  modified_base 14: mod_base = OTHER; note = 2'-O-methyl modified nucleotide with phosphorothioate linkage
  modified_base 15: mod_base = OTHER; note = 2'-fluoro trivalent N-acetylgalactosamine modified nucleotide
tttatagcacttcca

SEQ ID NO: 1935 - RNA, 15 nt, synthetic construct
  source 1..15: mol_type = other RNA
  modified_base 1: mod_base = OTHER; note = 2'-fluoro modified nucleotide with phosphorothioate linkage
  modified_base 2: mod_base = OTHER; note = 2'-O-methyl modified nucleotide with phosphorothioate linkage
  modified_base 3: mod_base = OTHER; note = 2'-fluoro modified nucleotide
  modified_base 4: mod_base = OTHER; note = 2'-O-methyl modified nucleotide
  modified_base 5: mod_base = OTHER; note = 2'-fluoro modified nucleotide
  modified_base 6: mod_base = OTHER; note = 2'-O-methyl modified nucleotide
  modified_base 7: mod_base = OTHER; note = 2'-fluoro modified nucleotide
  modified_base 8: mod_base = OTHER; note = 2'-O-methyl modified nucleotide
  modified_base 9: mod_base = OTHER; note = 2'-fluoro modified nucleotide
  modified_base 10: mod_base = OTHER; note = 2'-O-methyl modified nucleotide
  modified_base 11: mod_base = OTHER; note = 2'-fluoro modified nucleotide
  modified_base 12: mod_base = OTHER; note = 2'-O-methyl modified nucleotide
  modified_base 13: mod_base = OTHER; note = 2'-fluoro modified nucleotide with phosphorothioate linkage
  modified_base 14: mod_base = OTHER; note = 2'-O-methyl modified nucleotide with phosphorothioate linkage
  modified_base 15: mod_base = OTHER; note = 2'-fluoro trivalent N-acetylgalactosamine modified nucleotide
tttaagagtacttga

SEQ ID NO: 1936 - RNA, 15 nt, synthetic construct
  source 1..15: mol_type = other RNA
  modified_base 1: mod_base = OTHER; note = 2'-fluoro modified nucleotide with phosphorothioate linkage
  modified_base 2: mod_base = OTHER; note = 2'-O-methyl modified nucleotide with phosphorothioate linkage
  modified_base 3: mod_base = OTHER; note = 2'-fluoro modified nucleotide
  modified_base 4: mod_base = OTHER; note = 2'-O-methyl modified nucleotide
  modified_base 5: mod_base = OTHER; note = 2'-fluoro modified nucleotide
  modified_base 6: mod_base = OTHER; note = 2'-O-methyl modified nucleotide
  modified_base 7: mod_base = OTHER; note = 2'-fluoro modified nucleotide
  modified_base 8: mod_base = OTHER; note = 2'-O-methyl modified nucleotide
  modified_base 9: mod_base = OTHER; note = 2'-fluoro modified nucleotide
  modified_base 10: mod_base = OTHER; note = 2'-O-methyl modified nucleotide
  modified_base 11: mod_base = OTHER; note = 2'-fluoro modified nucleotide
  modified_base 12: mod_base = OTHER; note = 2'-O-methyl modified nucleotide
  modified_base 13: mod_base = OTHER; note = 2'-fluoro modified nucleotide with phosphorothioate linkage
  modified_base 14: mod_base = OTHER; note = 2'-O-methyl modified nucleotide with phosphorothioate linkage
  modified_base 15: mod_base = OTHER; note = 2'-fluoro trivalent N-acetylgalactosamine modified nucleotide
caggaaatcattgga

SEQ ID NO: 1937 - RNA, 15 nt, synthetic construct
  source 1..15: mol_type = other RNA
  modified_base 1: mod_base = OTHER; note = 2'-fluoro modified nucleotide with phosphorothioate linkage
  modified_base 2: mod_base = OTHER; note = 2'-O-methyl modified nucleotide with phosphorothioate linkage
  modified_base 3: mod_base = OTHER; note = 2'-fluoro modified nucleotide
  modified_base 4: mod_base = OTHER; note = 2'-O-methyl modified nucleotide
  modified_base 5: mod_base = OTHER; note = 2'-fluoro modified nucleotide
  modified_base 6: mod_base = OTHER; note = 2'-O-methyl modified nucleotide
  modified_base 7: mod_base = OTHER; note = 2'-fluoro modified nucleotide
  modified_base 8: mod_base = OTHER; note = 2'-O-methyl modified nucleotide
  modified_base 9: mod_base = OTHER; note = 2'-fluoro modified nucleotide
  modified_base 10: mod_base = OTHER; note = 2'-O-methyl modified nucleotide
  modified_base 11: mod_base = OTHER; note = 2'-fluoro modified nucleotide
  modified_base 12: mod_base = OTHER; note = 2'-O-methyl modified nucleotide
  modified_base 13: mod_base = OTHER; note = 2'-fluoro modified nucleotide with phosphorothioate linkage
  modified_base 14: mod_base = OTHER; note = 2'-O-methyl modified nucleotide with phosphorothioate linkage
  modified_base 15: mod_base = OTHER; note = 2'-fluoro trivalent N-acetylgalactosamine modified nucleotide
aatgaatataccata

SEQ ID NO: 1938 - RNA, 15 nt, synthetic construct
  source 1..15: mol_type = other RNA
  modified_base 1: mod_base = OTHER; note = 2'-fluoro modified nucleotide with phosphorothioate linkage
  modified_base 2: mod_base = OTHER; note = 2'-O-methyl modified nucleotide with phosphorothioate linkage
  modified_base 3: mod_base = OTHER; note = 2'-fluoro modified nucleotide
  modified_base 4: mod_base = OTHER; note = 2'-O-methyl modified nucleotide
  modified_base 5: mod_base = OTHER; note = 2'-fluoro modified nucleotide
  modified_base 6: mod_base = OTHER; note = 2'-O-methyl modified nucleotide
  modified_base 7: mod_base = OTHER; note = 2'-fluoro modified nucleotide
  modified_base 8: mod_base = OTHER; note = 2'-O-methyl modified nucleotide
  modified_base 9: mod_base = OTHER; note = 2'-fluoro modified nucleotide
  modified_base 10: mod_base = OTHER; note = 2'-O-methyl modified nucleotide
  modified_base 11: mod_base = OTHER; note = 2'-fluoro modified nucleotide
  modified_base 12: mod_base = OTHER; note = 2'-O-methyl modified nucleotide
  modified_base 13: mod_base = OTHER; note = 2'-fluoro modified nucleotide with phosphorothioate linkage
  modified_base 14: mod_base = OTHER; note = 2'-O-methyl modified nucleotide with phosphorothioate linkage
  modified_base 15: mod_base = OTHER; note = 2'-fluoro trivalent N-acetylgalactosamine modified nucleotide
aagttcatcttgtta

SEQ ID NO: 1939 - RNA, 15 nt, synthetic construct
  source 1..15: mol_type = other RNA
  modified_base 1: mod_base = OTHER; note = 2'-fluoro modified nucleotide with phosphorothioate linkage
  modified_base 2: mod_base = OTHER; note = 2'-O-methyl modified nucleotide with phosphorothioate linkage
  modified_base 3: mod_base = OTHER; note = 2'-fluoro modified nucleotide
  modified_base 4: mod_base = OTHER; note = 2'-O-methyl modified nucleotide
  modified_base 5: mod_base = OTHER; note = 2'-fluoro modified nucleotide
  modified_base 6: mod_base = OTHER; note = 2'-O-methyl modified nucleotide
  modified_base 7: mod_base = OTHER; note = 2'-fluoro modified nucleotide
  modified_base 8: mod_base = OTHER; note = 2'-O-methyl modified nucleotide
  modified_base 9: mod_base = OTHER; note = 2'-fluoro modified nucleotide
  modified_base 10: mod_base = OTHER; note = 2'-O-methyl modified nucleotide
  modified_base 11: mod_base = OTHER; note = 2'-fluoro modified nucleotide
  modified_base 12: mod_base = OTHER; note = 2'-O-methyl modified nucleotide
  modified_base 13: mod_base = OTHER; note = 2'-fluoro modified nucleotide with phosphorothioate linkage
  modified_base 14: mod_base = OTHER; note = 2'-O-methyl modified nucleotide with phosphorothioate linkage
  modified_base 15: mod_base = OTHER; note = 2'-fluoro trivalent N-acetylgalactosamine modified nucleotide
aattcctgaagttca

SEQ ID NO: 1940 - RNA, 15 nt, synthetic construct
  source 1..15: mol_type = other RNA
  modified_base 1: mod_base = OTHER; note = 2'-fluoro modified nucleotide with phosphorothioate linkage
  modified_base 2: mod_base = OTHER; note = 2'-O-methyl modified nucleotide with phosphorothioate linkage
  modified_base 3: mod_base = OTHER; note = 2'-fluoro modified nucleotide
  modified_base 4: mod_base = OTHER; note = 2'-O-methyl modified nucleotide
  modified_base 5: mod_base = OTHER; note = 2'-fluoro modified nucleotide
  modified_base 6: mod_base = OTHER; note = 2'-O-methyl modified nucleotide
  modified_base 7: mod_base = OTHER; note = 2'-fluoro modified nucleotide
  modified_base 8: mod_base = OTHER; note = 2'-O-methyl modified nucleotide
  modified_base 9: mod_base = OTHER; note = 2'-fluoro modified nucleotide
  modified_base 10: mod_base = OTHER; note = 2'-O-methyl modified nucleotide
  modified_base 11: mod_base = OTHER; note = 2'-fluoro modified nucleotide
  modified_base 12: mod_base = OTHER; note = 2'-O-methyl modified nucleotide
  modified_base 13: mod_base = OTHER; note = 2'-fluoro modified nucleotide with phosphorothioate linkage
  modified_base 14: mod_base = OTHER; note = 2'-O-methyl modified nucleotide with phosphorothioate linkage
  modified_base 15: mod_base = OTHER; note = 2'-fluoro trivalent N-acetylgalactosamine modified nucleotide
aataagagaagacta

SEQ ID NO: 1941 - RNA, 15 nt, synthetic construct
  source 1..15: mol_type = other RNA
  modified_base 1: mod_base = OTHER; note = 2'-fluoro modified nucleotide with phosphorothioate linkage
  modified_base 2: mod_base = OTHER; note = 2'-O-methyl modified nucleotide with phosphorothioate linkage
  modified_base 3: mod_base = OTHER; note = 2'-fluoro modified nucleotide
  modified_base 4: mod_base = OTHER; note = 2'-O-methyl modified nucleotide
  modified_base 5: mod_base = OTHER; note = 2'-fluoro modified nucleotide
  modified_base 6: mod_base = OTHER; note = 2'-O-methyl modified nucleotide
  modified_base 7: mod_base = OTHER; note = 2'-fluoro modified nucleotide
  modified_base 8: mod_base = OTHER; note = 2'-O-methyl modified nucleotide
  modified_base 9: mod_base = OTHER; note = 2'-fluoro modified nucleotide
  modified_base 10: mod_base = OTHER; note = 2'-O-methyl modified nucleotide
  modified_base 11: mod_base = OTHER; note = 2'-fluoro modified nucleotide
  modified_base 12: mod_base = OTHER; note = 2'-O-methyl modified nucleotide
  modified_base 13: mod_base = OTHER; note = 2'-fluoro modified nucleotide with phosphorothioate linkage
  modified_base 14: mod_base = OTHER; note = 2'-O-methyl modified nucleotide with phosphorothioate linkage
  modified_base 15: mod_base = OTHER; note = 2'-fluoro trivalent N-acetylgalactosamine modified nucleotide
aaagtataaacatta

SEQ ID NO: 1942 - RNA, 15 nt, synthetic construct
  source 1..15: mol_type = other RNA
  modified_base 1: mod_base = OTHER; note = 2'-fluoro modified nucleotide with phosphorothioate linkage
  modified_base 2: mod_base = OTHER; note = 2'-O-methyl modified nucleotide with phosphorothioate linkage
  modified_base 3: mod_base = OTHER; note = 2'-fluoro modified nucleotide
  modified_base 4: mod_base = OTHER; note = 2'-O-methyl modified nucleotide
  modified_base 5: mod_base = OTHER; note = 2'-fluoro modified nucleotide
  modified_base 6: mod_base = OTHER; note = 2'-O-methyl modified nucleotide
  modified_base 7: mod_base = OTHER; note = 2'-fluoro modified nucleotide
  modified_base 8: mod_base = OTHER; note = 2'-O-methyl modified nucleotide
  modified_base 9: mod_base = OTHER; note = 2'-fluoro modified nucleotide
  modified_base 10: mod_base = OTHER; note = 2'-O-methyl modified nucleotide
  modified_base 11: mod_base = OTHER; note = 2'-fluoro modified nucleotide
  modified_base 12: mod_base = OTHER; note = 2'-O-methyl modified nucleotide
  modified_base 13: mod_base = OTHER; note = 2'-fluoro modified nucleotide with phosphorothioate linkage
  modified_base 14: mod_base = OTHER; note = 2'-O-methyl modified nucleotide with phosphorothioate linkage
  modified_base 15: mod_base = OTHER; note = 2'-fluoro trivalent N-acetylgalactosamine modified nucleotide
tgtgtacgattccga

SEQ ID NO: 1943 - RNA, 15 nt, synthetic construct
  source 1..15: mol_type = other RNA
  modified_base 1: mod_base = OTHER; note = 2'-fluoro modified nucleotide with phosphorothioate linkage
  modified_base 2: mod_base = OTHER; note = 2'-O-methyl modified nucleotide with phosphorothioate linkage
  modified_base 3: mod_base = OTHER; note = 2'-fluoro modified nucleotide
  modified_base 4: mod_base = OTHER; note = 2'-O-methyl modified nucleotide
  modified_base 5: mod_base = OTHER; note = 2'-fluoro modified nucleotide
  modified_base 6: mod_base = OTHER; note = 2'-O-methyl modified nucleotide
  modified_base 7: mod_base = OTHER; note = 2'-fluoro modified nucleotide
  modified_base 8: mod_base = OTHER; note = 2'-O-methyl modified nucleotide
  modified_base 9: mod_base = OTHER; note = 2'-fluoro modified nucleotide
  modified_base 10: mod_base = OTHER; note = 2'-O-methyl modified nucleotide
  modified_base 11: mod_base = OTHER; note = 2'-fluoro modified nucleotide
  modified_base 12: mod_base = OTHER; note = 2'-O-methyl modified nucleotide
  modified_base 13: mod_base = OTHER; note = 2'-fluoro modified nucleotide with phosphorothioate linkage
  modified_base 14: mod_base = OTHER; note = 2'-O-methyl modified nucleotide with phosphorothioate linkage
  modified_base 15: mod_base = OTHER; note = 2'-fluoro trivalent N-acetylgalactosamine modified nucleotide
aagagcagaggtata

SEQ ID NO: 1944 - RNA, 15 nt, synthetic construct
  source 1..15: mol_type = other RNA
  modified_base 1: mod_base = OTHER; note = 2'-fluoro modified nucleotide with phosphorothioate linkage
  modified_base 2: mod_base = OTHER; note = 2'-O-methyl modified nucleotide with phosphorothioate linkage
  modified_base 3: mod_base = OTHER; note = 2'-fluoro modified nucleotide
  modified_base 4: mod_base = OTHER; note = 2'-O-methyl modified nucleotide
  modified_base 5: mod_base = OTHER; note = 2'-fluoro modified nucleotide
  modified_base 6: mod_base = OTHER; note = 2'-O-methyl modified nucleotide
  modified_base 7: mod_base = OTHER; note = 2'-fluoro modified nucleotide
  modified_base 8: mod_base = OTHER; note = 2'-O-methyl modified nucleotide
  modified_base 9: mod_base = OTHER; note = 2'-fluoro modified nucleotide
  modified_base 10: mod_base = OTHER; note = 2'-O-methyl modified nucleotide
  modified_base 11: mod_base = OTHER; note = 2'-fluoro modified nucleotide
  modified_base 12: mod_base = OTHER; note = 2'-O-methyl modified nucleotide
  modified_base 13: mod_base = OTHER; note = 2'-fluoro modified nucleotide with phosphorothioate linkage
  modified_base 14: mod_base = OTHER; note = 2'-O-methyl modified nucleotide with phosphorothioate linkage
  modified_base 15: mod_base = OTHER; note = 2'-fluoro trivalent N-acetylgalactosamine modified nucleotide
tagaagaaattgata

SEQ ID NO: 1945 - RNA, 15 nt, synthetic construct
  source 1..15: mol_type = other RNA
  modified_base 1: mod_base = OTHER; note = 2'-fluoro modified nucleotide with phosphorothioate linkage
  modified_base 2: mod_base = OTHER; note = 2'-O-methyl modified nucleotide with phosphorothioate linkage
  modified_base 3: mod_base = OTHER; note = 2'-fluoro modified nucleotide
  modified_base 4: mod_base = OTHER; note = 2'-O-methyl modified nucleotide
  modified_base 5: mod_base = OTHER; note = 2'-fluoro modified nucleotide
  modified_base 6: mod_base = OTHER; note = 2'-O-methyl modified nucleotide
  modified_base 7: mod_base = OTHER; note = 2'-fluoro modified nucleotide
  modified_base 8: mod_base = OTHER; note = 2'-O-methyl modified nucleotide
  modified_base 9: mod_base = OTHER; note = 2'-fluoro modified nucleotide
  modified_base 10: mod_base = OTHER; note = 2'-O-methyl modified nucleotide
  modified_base 11: mod_base = OTHER; note = 2'-fluoro modified nucleotide
  modified_base 12: mod_base = OTHER; note = 2'-O-methyl modified nucleotide
  modified_base 13: mod_base = OTHER; note = 2'-fluoro modified nucleotide with phosphorothioate linkage
  modified_base 14: mod_base = OTHER; note = 2'-O-methyl modified nucleotide with phosphorothioate linkage
  modified_base 15: mod_base = OTHER; note = 2'-fluoro trivalent N-acetylgalactosamine modified nucleotide
caaaacacaatgtta

SEQ ID NO: 1946 - RNA, 15 nt, synthetic construct
  source 1..15: mol_type = other RNA
  modified_base 1: mod_base = OTHER; note = 2'-fluoro modified nucleotide with phosphorothioate linkage
  modified_base 2: mod_base = OTHER; note = 2'-O-methyl modified nucleotide with phosphorothioate linkage
  modified_base 3: mod_base = OTHER; note = 2'-fluoro modified nucleotide
  modified_base 4: mod_base = OTHER; note = 2'-O-methyl modified nucleotide
  modified_base 5: mod_base = OTHER; note = 2'-fluoro modified nucleotide
  modified_base 6: mod_base = OTHER; note = 2'-O-methyl modified nucleotide
  modified_base 7: mod_base = OTHER; note = 2'-fluoro modified nucleotide
  modified_base 8: mod_base = OTHER; note = 2'-O-methyl modified nucleotide
  modified_base 9: mod_base = OTHER; note = 2'-fluoro modified nucleotide
  modified_base 10: mod_base = OTHER; note = 2'-O-methyl modified nucleotide
  modified_base 11: mod_base = OTHER; note = 2'-fluoro modified nucleotide
  modified_base 12: mod_base = OTHER; note = 2'-O-methyl modified nucleotide
  modified_base 13: mod_base = OTHER; note = 2'-fluoro modified nucleotide with phosphorothioate linkage
  modified_base 14: mod_base = OTHER; note = 2'-O-methyl modified nucleotide with phosphorothioate linkage
  modified_base 15: mod_base = OTHER; note = 2'-fluoro trivalent N-acetylgalactosamine modified nucleotide
atgcttataaagtta

SEQ ID NO: 1947 - RNA, 15 nt, synthetic construct
  source 1..15: mol_type = other RNA
  modified_base 1: mod_base = OTHER; note = 2'-fluoro modified nucleotide with phosphorothioate linkage
  modified_base 2: mod_base = OTHER; note = 2'-O-methyl modified nucleotide with phosphorothioate linkage
  modified_base 3: mod_base = OTHER; note = 2'-fluoro modified nucleotide
  modified_base 4: mod_base = OTHER; note = 2'-O-methyl modified nucleotide
  modified_base 5: mod_base = OTHER; note = 2'-fluoro modified nucleotide
  modified_base 6: mod_base = OTHER; note = 2'-O-methyl modified nucleotide
  modified_base 7: mod_base = OTHER; note = 2'-fluoro modified nucleotide
  modified_base 8: mod_base = OTHER; note = 2'-O-methyl modified nucleotide
  modified_base 9: mod_base = OTHER; note = 2'-fluoro modified nucleotide
  modified_base 10: mod_base = OTHER; note = 2'-O-methyl modified nucleotide
  modified_base 11: mod_base = OTHER; note = 2'-fluoro modified nucleotide
  modified_base 12: mod_base = OTHER; note = 2'-O-methyl modified nucleotide
  modified_base 13: mod_base = OTHER; note = 2'-fluoro modified nucleotide with phosphorothioate linkage
  modified_base 14: mod_base = OTHER; note = 2'-O-methyl modified nucleotide with phosphorothioate linkage
  modified_base 15: mod_base = OTHER; note = 2'-fluoro trivalent N-acetylgalactosamine modified nucleotide
ttaaaagttatccta

SEQ ID NO: 1948 - RNA, 15 nt, synthetic construct
  source 1..15: mol_type = other RNA
  modified_base 1: mod_base = OTHER; note = 2'-fluoro modified nucleotide with phosphorothioate linkage
  modified_base 2: mod_base = OTHER; note = 2'-O-methyl modified nucleotide with phosphorothioate linkage
  modified_base 3: mod_base = OTHER; note = 2'-fluoro modified nucleotide
  modified_base 4: mod_base = OTHER; note = 2'-O-methyl modified nucleotide
  modified_base 5: mod_base = OTHER; note = 2'-fluoro modified nucleotide
  modified_base 6: mod_base = OTHER; note = 2'-O-methyl modified nucleotide
  modified_base 7: mod_base = OTHER; note = 2'-fluoro modified nucleotide
  modified_base 8: mod_base = OTHER; note = 2'-O-methyl modified nucleotide
  modified_base 9: mod_base = OTHER; note = 2'-fluoro modified nucleotide
  modified_base 10: mod_base = OTHER; note = 2'-O-methyl modified nucleotide
  modified_base 11: mod_base = OTHER; note = 2'-fluoro modified nucleotide
  modified_base 12: mod_base = OTHER; note = 2'-O-methyl modified nucleotide
  modified_base 13: mod_base = OTHER; note = 2'-fluoro modified nucleotide with phosphorothioate linkage
  modified_base 14: mod_base = OTHER; note = 2'-O-methyl modified nucleotide with phosphorothioate linkage
  modified_base 15: mod_base = OTHER; note = 2'-fluoro trivalent N-acetylgalactosamine modified nucleotide
tatcaaccaataaaa

SEQ ID NO: 1949 - RNA, 15 nt, synthetic construct
  source 1..15: mol_type = other RNA
  modified_base 1: mod_base = OTHER; note = 2'-fluoro modified nucleotide with phosphorothioate linkage
  modified_base 2: mod_base = OTHER; note = 2'-O-methyl modified nucleotide with phosphorothioate linkage
  modified_base 3: mod_base = OTHER; note = 2'-fluoro modified nucleotide
  modified_base 4: mod_base = OTHER; note = 2'-O-methyl modified nucleotide
  modified_base 5: mod_base = OTHER; note = 2'-fluoro modified nucleotide
  modified_base 6: mod_base = OTHER; note = 2'-O-methyl modified nucleotide
  modified_base 7: mod_base = OTHER; note = 2'-fluoro modified nucleotide
  modified_base 8: mod_base = OTHER; note = 2'-O-methyl modified nucleotide
  modified_base 9: mod_base = OTHER; note = 2'-fluoro modified nucleotide
  modified_base 10: mod_base = OTHER; note = 2'-O-methyl modified nucleotide
  modified_base 11: mod_base = OTHER; note = 2'-fluoro modified nucleotide
  modified_base 12: mod_base = OTHER; note = 2'-O-methyl modified nucleotide
  modified_base 13: mod_base = OTHER; note = 2'-fluoro modified nucleotide with phosphorothioate linkage
  modified_base 14: mod_base = OTHER; note = 2'-O-methyl modified nucleotide with phosphorothioate linkage
  modified_base 15: mod_base = OTHER; note = 2'-fluoro trivalent N-acetylgalactosamine modified nucleotide
aagaaaacagttgca

SEQ ID NO: 1950 - RNA, 15 nt, synthetic construct
  source 1..15: mol_type = other RNA
  modified_base 1: mod_base = OTHER; note = 2'-fluoro modified nucleotide with phosphorothioate linkage
  modified_base 2: mod_base = OTHER; note = 2'-O-methyl modified nucleotide with phosphorothioate linkage
  modified_base 3: mod_base = OTHER; note = 2'-fluoro modified nucleotide
  modified_base 4: mod_base = OTHER; note = 2'-O-methyl modified nucleotide
  modified_base 5: mod_base = OTHER; note = 2'-fluoro modified nucleotide
  modified_base 6: mod_base = OTHER; note = 2'-O-methyl modified nucleotide
  modified_base 7: mod_base = OTHER; note = 2'-fluoro modified nucleotide
  modified_base 8: mod_base = OTHER; note = 2'-O-methyl modified nucleotide
  modified_base 9: mod_base = OTHER; note = 2'-fluoro modified nucleotide
  modified_base 10: mod_base = OTHER; note = 2'-O-methyl modified nucleotide
  modified_base 11: mod_base = OTHER; note = 2'-fluoro modified nucleotide
  modified_base 12: mod_base = OTHER; note = 2'-O-methyl modified nucleotide
  modified_base 13: mod_base = OTHER; note = 2'-fluoro modified nucleotide with phosphorothioate linkage
  modified_base 14: mod_base = OTHER; note = 2'-O-methyl modified nucleotide with phosphorothioate linkage
  modified_base 15: mod_base = OTHER; note = 2'-fluoro trivalent N-acetylgalactosamine modified nucleotide
agttgtatcaaagca

SEQ ID NO: 1951 - RNA, 15 nt, synthetic construct
  source 1..15: mol_type = other RNA
  modified_base 1: mod_base = OTHER; note = 2'-fluoro modified nucleotide with phosphorothioate linkage
  modified_base 2: mod_base = OTHER; note = 2'-O-methyl modified nucleotide with phosphorothioate linkage
  modified_base 3: mod_base = OTHER; note = 2'-fluoro modified nucleotide
  modified_base 4: mod_base = OTHER; note = 2'-O-methyl modified nucleotide
  modified_base 5: mod_base = OTHER; note = 2'-fluoro modified nucleotide
  modified_base 6: mod_base = OTHER; note = 2'-O-methyl modified nucleotide
  modified_base 7: mod_base = OTHER; note = 2'-fluoro modified nucleotide
  modified_base 8: mod_base = OTHER; note = 2'-O-methyl modified nucleotide
  modified_base 9: mod_base = OTHER; note = 2'-fluoro modified nucleotide
  modified_base 10: mod_base = OTHER; note = 2'-O-methyl modified nucleotide
  modified_base 11: mod_base = OTHER; note = 2'-fluoro modified nucleotide
  modified_base 12: mod_base = OTHER; note = 2'-O-methyl modified nucleotide
  modified_base 13: mod_base = OTHER; note = 2'-fluoro modified nucleotide with phosphorothioate linkage
  modified_base 14: mod_base = OTHER; note = 2'-O-methyl modified nucleotide with phosphorothioate linkage
  modified_base 15: mod_base = OTHER; note = 2'-fluoro trivalent N-acetylgalactosamine modified nucleotide
agagagaagctttga

SEQ ID NO: 1952 - RNA, 15 nt, synthetic construct
  source 1..15: mol_type = other RNA
  modified_base 1: mod_base = OTHER; note = 2'-fluoro modified nucleotide with phosphorothioate linkage
  modified_base 2: mod_base = OTHER; note = 2'-O-methyl modified nucleotide with phosphorothioate linkage
  modified_base 3: mod_base = OTHER; note = 2'-fluoro modified nucleotide
  modified_base 4: mod_base = OTHER; note = 2'-O-methyl modified nucleotide
  modified_base 5: mod_base = OTHER; note = 2'-fluoro modified nucleotide
  modified_base 6: mod_base = OTHER; note = 2'-O-methyl modified nucleotide
  modified_base 7: mod_base = OTHER; note = 2'-fluoro modified nucleotide
  modified_base 8: mod_base = OTHER; note = 2'-O-methyl modified nucleotide
  modified_base 9: mod_base = OTHER; note = 2'-fluoro modified nucleotide
  modified_base 10: mod_base = OTHER; note = 2'-O-methyl modified nucleotide
  modified_base 11: mod_base = OTHER; note = 2'-fluoro modified nucleotide
  modified_base 12: mod_base = OTHER; note = 2'-O-methyl modified nucleotide
  modified_base 13: mod_base = OTHER; note = 2'-fluoro modified nucleotide with phosphorothioate linkage
  modified_base 14: mod_base = OTHER; note = 2'-O-methyl modified nucleotide with phosphorothioate linkage
  modified_base 15: mod_base = OTHER; note = 2'-fluoro trivalent N-acetylgalactosamine modified nucleotide
acgaaaggagttcca

SEQ ID NO: 1953 - RNA, 15 nt, synthetic construct
  source 1..15: mol_type = other RNA
  modified_base 1: mod_base = OTHER; note = 2'-fluoro modified nucleotide with phosphorothioate linkage
  modified_base 2: mod_base = OTHER; note = 2'-O-methyl modified nucleotide with phosphorothioate linkage
  modified_base 3: mod_base = OTHER; note = 2'-fluoro modified nucleotide
  modified_base 4: mod_base = OTHER; note = 2'-O-methyl modified nucleotide
  modified_base 5: mod_base = OTHER; note = 2'-fluoro modified nucleotide
  modified_base 6: mod_base = OTHER; note = 2'-O-methyl modified nucleotide
  modified_base 7: mod_base = OTHER; note = 2'-fluoro modified nucleotide
  modified_base 8: mod_base = OTHER; note = 2'-O-methyl modified nucleotide
  modified_base 9: mod_base = OTHER; note = 2'-fluoro modified nucleotide
  modified_base 10: mod_base = OTHER; note = 2'-O-methyl modified nucleotide
  modified_base 11: mod_base = OTHER; note = 2'-fluoro modified nucleotide
  modified_base 12: mod_base = OTHER; note = 2'-O-methyl modified nucleotide
  modified_base 13: mod_base = OTHER; note = 2'-fluoro modified nucleotide with phosphorothioate linkage
  modified_base 14: mod_base = OTHER; note = 2'-O-methyl modified nucleotide with phosphorothioate linkage
  modified_base 15: mod_base = OTHER; note = 2'-fluoro trivalent N-acetylgalactosamine modified nucleotide
caaagaactgtcata

SEQ ID NO: 1954 - RNA, 15 nt, synthetic construct
  source 1..15: mol_type = other RNA
  modified_base 1: mod_base = OTHER; note = 2'-fluoro modified nucleotide with phosphorothioate linkage
  modified_base 2: mod_base = OTHER; note = 2'-O-methyl modified nucleotide with phosphorothioate linkage
  modified_base 3: mod_base = OTHER; note = 2'-fluoro modified nucleotide
  modified_base 4: mod_base = OTHER; note = 2'-O-methyl modified nucleotide
  modified_base 5: mod_base = OTHER; note = 2'-fluoro modified nucleotide
  modified_base 6: mod_base = OTHER; note = 2'-O-methyl modified nucleotide
  modified_base 7: mod_base = OTHER; note = 2'-fluoro modified nucleotide
  modified_base 8: mod_base = OTHER; note = 2'-O-methyl modified nucleotide
  modified_base 9: mod_base = OTHER; note = 2'-fluoro modified nucleotide
  modified_base 10: mod_base = OTHER; note = 2'-O-methyl modified nucleotide
  modified_base 11: mod_base = OTHER; note = 2'-fluoro modified nucleotide
  modified_base 12: mod_base = OTHER; note = 2'-O-methyl modified nucleotide
  modified_base 13: mod_base = OTHER; note = 2'-fluoro modified nucleotide with phosphorothioate linkage
  modified_base 14: mod_base = OTHER; note = 2'-O-methyl modified nucleotide with phosphorothioate linkage
  modified_base 15: mod_base = OTHER; note = 2'-fluoro trivalent N-acetylgalactosamine modified nucleotide
catgttattctgcaa

SEQ ID NO: 1955 - RNA, 15 nt, synthetic construct
  source 1..15: mol_type = other RNA
  modified_base 1: mod_base = OTHER; note = 2'-fluoro modified nucleotide with phosphorothioate linkage
  modified_base 2: mod_base = OTHER; note = 2'-O-methyl modified nucleotide with phosphorothioate linkage
  modified_base 3: mod_base = OTHER; note = 2'-fluoro modified nucleotide
  modified_base 4: mod_base = OTHER; note = 2'-O-methyl modified nucleotide
  modified_base 5: mod_base = OTHER; note = 2'-fluoro modified nucleotide
  modified_base 6: mod_base = OTHER; note = 2'-O-methyl modified nucleotide
  modified_base 7: mod_base = OTHER; note = 2'-fluoro modified nucleotide
  modified_base 8: mod_base = OTHER; note = 2'-O-methyl modified nucleotide
  modified_base 9: mod_base = OTHER; note = 2'-fluoro modified nucleotide
  modified_base 10: mod_base = OTHER; note = 2'-O-methyl modified nucleotide
  modified_base 11: mod_base = OTHER; note = 2'-fluoro modified nucleotide
  modified_base 12: mod_base = OTHER; note = 2'-O-methyl modified nucleotide
  modified_base 13: mod_base = OTHER; note = 2'-fluoro modified nucleotide with phosphorothioate linkage
  modified_base 14: mod_base = OTHER; note = 2'-O-methyl modified nucleotide with phosphorothioate linkage
  modified_base 15: mod_base = OTHER; note = 2'-fluoro trivalent N-acetylgalactosamine modified nucleotide
actataggacttcta

SEQ ID NO: 1956 - RNA, 15 nt, synthetic construct
  source 1..15: mol_type = other RNA
  modified_base 1: mod_base = OTHER; note = 2'-fluoro modified nucleotide with phosphorothioate linkage
  modified_base 2: mod_base = OTHER; note = 2'-O-methyl modified nucleotide with phosphorothioate linkage
  modified_base 3: mod_base = OTHER; note = 2'-fluoro modified nucleotide
  modified_base 4: mod_base = OTHER; note = 2'-O-methyl modified nucleotide
  modified_base 5: mod_base = OTHER; note = 2'-fluoro modified nucleotide
  modified_base 6: mod_base = OTHER; note = 2'-O-methyl modified nucleotide
  modified_base 7: mod_base = OTHER; note = 2'-fluoro modified nucleotide
  modified_base 8: mod_base = OTHER; note = 2'-O-methyl modified nucleotide
  modified_base 9: mod_base = OTHER; note = 2'-fluoro modified nucleotide
  modified_base 10: mod_base = OTHER; note = 2'-O-methyl modified nucleotide
  modified_base 11: mod_base = OTHER; note = 2'-fluoro modified nucleotide
  modified_base 12: mod_base = OTHER; note = 2'-O-methyl modified nucleotide
  modified_base 13: mod_base = OTHER; note = 2'-fluoro modified nucleotide with phosphorothioate linkage
  modified_base 14: mod_base = OTHER; note = 2'-O-methyl modified nucleotide with phosphorothioate linkage
  modified_base 15: mod_base = OTHER; note = 2'-fluoro trivalent N-acetylgalactosamine modified nucleotide
ctattaaaagttata

SEQ ID NO: 1957 - RNA, 15 nt, synthetic construct
  source 1..15: mol_type = other RNA
  modified_base 1: mod_base = OTHER; note = 2'-fluoro modified nucleotide with phosphorothioate linkage
  modified_base 2: mod_base = OTHER; note = 2'-O-methyl modified nucleotide with phosphorothioate linkage
  modified_base 3: mod_base = OTHER; note = 2'-fluoro modified nucleotide
  modified_base 4: mod_base = OTHER; note = 2'-O-methyl modified nucleotide
  modified_base 5: mod_base = OTHER; note = 2'-fluoro modified nucleotide
  modified_base 6: mod_base = OTHER; note = 2'-O-methyl modified nucleotide
  modified_base 7: mod_base = OTHER; note = 2'-fluoro modified nucleotide
  modified_base 8: mod_base = OTHER; note = 2'-O-methyl modified nucleotide
  modified_base 9: mod_base = OTHER; note = 2'-fluoro modified nucleotide
  modified_base 10: mod_base = OTHER; note = 2'-O-methyl modified nucleotide
  modified_base 11: mod_base = OTHER; note = 2'-fluoro modified nucleotide
  modified_base 12: mod_base = OTHER; note = 2'-O-methyl modified nucleotide
  modified_base 13: mod_base = OTHER; note = 2'-fluoro modified nucleotide with phosphorothioate linkage
  modified_base 14: mod_base = OTHER; note = 2'-O-methyl modified nucleotide with phosphorothioate linkage
  modified_base 15: mod_base = OTHER; note = 2'-fluoro trivalent N-acetylgalactosamine modified nucleotide
aaaagaaatcttaga

SEQ ID NO: 1958 - RNA, 15 nt, synthetic construct
  source 1..15: mol_type = other RNA
  modified_base 1: mod_base = OTHER; note = 2'-fluoro modified nucleotide with phosphorothioate linkage
  modified_base 2: mod_base = OTHER; note = 2'-O-methyl modified nucleotide with phosphorothioate linkage
  modified_base 3: mod_base = OTHER; note = 2'-fluoro modified nucleotide
  modified_base 4: mod_base = OTHER; note = 2'-O-methyl modified nucleotide
  modified_base 5: mod_base = OTHER; note = 2'-fluoro modified nucleotide
  modified_base 6: mod_base = OTHER; note = 2'-O-methyl modified nucleotide
  modified_base 7: mod_base = OTHER; note = 2'-fluoro modified nucleotide
  modified_base 8: mod_base = OTHER; note = 2'-O-methyl modified nucleotide
  modified_base 9: mod_base = OTHER; note = 2'-fluoro modified nucleotide
  modified_base 10: mod_base = OTHER; note = 2'-O-methyl modified nucleotide
  modified_base 11: mod_base = OTHER; note = 2'-fluoro modified nucleotide
  modified_base 12: mod_base = OTHER; note = 2'-O-methyl modified nucleotide
  modified_base 13: mod_base = OTHER; note = 2'-fluoro modified nucleotide with phosphorothioate linkage
  modified_base 14: mod_base = OTHER; note = 2'-O-methyl modified nucleotide with phosphorothioate linkage
  modified_base 15: mod_base = OTHER; note = 2'-fluoro trivalent N-acetylgalactosamine modified nucleotide
ccatgttcatttata

SEQ ID NO: 1959 - RNA, 33 nt, synthetic construct
  source 1..33: mol_type = other RNA
  misc_difference 1: note = 2'-O-methyl modified nucleotide with phosphorothioate linkage may be 5' phosphate modified
  modified_base 2: mod_base = OTHER; note = 2'-fluoro modified nucleotide with phosphorothioate linkage
  modified_base 3: mod_base = OTHER; note = 2'-O-methyl modified nucleotide
  modified_base 4: mod_base = OTHER; note = 2'-fluoro modified nucleotide
  modified_base 5: mod_base = OTHER; note = 2'-O-methyl modified nucleotide
  modified_base 6: mod_base = OTHER; note = 2'-fluoro modified nucleotide
  modified_base 7: mod_base = OTHER; note = 2'-O-methyl modified nucleotide
  modified_base 8: mod_base = OTHER; note = 2'-fluoro modified nucleotide
  modified_base 9: mod_base = OTHER; note = 2'-O-methyl modified nucleotide
  modified_base 10: mod_base = OTHER; note = 2'-fluoro modified nucleotide
  modified_base 11: mod_base = OTHER; note = 2'-O-methyl modified nucleotide
  modified_base 12: mod_base = OTHER; note = 2'-fluoro modified nucleotide
  modified_base 13: mod_base = OTHER; note = 2'-O-methyl modified nucleotide
  modified_base 14: mod_base = OTHER; note = 2'-fluoro modified nucleotide with phosphorothioate linkage
  modified_base 15: mod_base = OTHER; note = 2'-O-methyl modified nucleotide with phosphorothioate linkage
  modified_base 16: mod_base = OTHER; note = 2'-fluoro modified nucleotide with phosphorothioate linkage
  modified_base 17: mod_base = OTHER; note = 2'-O-methyl modified nucleotide with phosphorothioate linkage
  modified_base 18: mod_base = OTHER; note = 2'-fluoro modified nucleotide with phosphorothioate linkage
  modified_base 19: mod_base = OTHER; note = 2'-O-methyl modified nucleotide with phosphorothioate linkage
  modified_base 20: mod_base = OTHER; note = 2'-O-methyl modified nucleotide
  modified_base 21: mod_base = OTHER; note = 2'-fluoro modified nucleotide
  modified_base 22: mod_base = OTHER; note = 2'-O-methyl modified nucleotide
  modified_base 23: mod_base = OTHER; note = 2'-fluoro modified nucleotide
  modified_base 24: mod_base = OTHER; note = 2'-O-methyl modified nucleotide
  modified_base 25: mod_base = OTHER; note = 2'-fluoro modified nucleotide
  modified_base 26: mod_base = OTHER; note = 2'-O-methyl modified nucleotide
  modified_base 27: mod_base = OTHER; note = 2'-fluoro modified nucleotide
  modified_base 28: mod_base = OTHER; note = 2'-O-methyl modified nucleotide
  modified_base 29: mod_base = OTHER; note = 2'-fluoro modified nucleotide
  modified_base 30: mod_base = OTHER; note = 2'-O-methyl modified nucleotide
  modified_base 31: mod_base = OTHER; note = 2'-fluoro modified nucleotide with phosphorothioate linkage
  modified_base 32: mod_base = OTHER; note = 2'-O-methyl modified nucleotide with phosphorothioate linkage
  modified_base 33: mod_base = OTHER; note = 2'-fluoro trivalent N-acetylgalactosamine modified nucleotide
ncacagtttggcctggagaaggccaaactgtga

SEQ ID NO: 1960 - RNA, 33 nt, synthetic construct
  source 1..33: mol_type = other RNA
  misc_difference 1: note = 2'-O-methyl modified nucleotide with phosphorothioate linkage may be 5' phosphate modified
  modified_base 2: mod_base = OTHER; note = 2'-fluoro modified nucleotide with phosphorothioate linkage
  modified_base 3: mod_base = OTHER; note = 2'-O-methyl modified nucleotide
  modified_base 4: mod_base = OTHER; note = 2'-fluoro modified nucleotide
  modified_base 5: mod_base = OTHER; note = 2'-O-methyl modified nucleotide
  modified_base 6: mod_base = OTHER; note = 2'-fluoro modified nucleotide
  modified_base 7: mod_base = OTHER; note = 2'-O-methyl modified nucleotide
  modified_base 8: mod_base = OTHER; note = 2'-fluoro modified nucleotide
  modified_base 9: mod_base = OTHER; note = 2'-O-methyl modified nucleotide
  modified_base 10: mod_base = OTHER; note = 2'-fluoro modified nucleotide
  modified_base 11: mod_base = OTHER; note = 2'-O-methyl modified nucleotide
  modified_base 12: mod_base = OTHER; note = 2'-fluoro modified nucleotide
  modified_base 13: mod_base = OTHER; note = 2'-O-methyl modified nucleotide
  modified_base 14: mod_base = OTHER; note = 2'-fluoro modified nucleotide with phosphorothioate linkage
  modified_base 15: mod_base = OTHER; note = 2'-O-methyl modified nucleotide with phosphorothioate linkage
  modified_base 16: mod_base = OTHER; note = 2'-fluoro modified nucleotide with phosphorothioate linkage
  modified_base 17: mod_base = OTHER; note = 2'-O-methyl modified nucleotide with phosphorothioate linkage
  modified_base 18: mod_base = OTHER; note = 2'-fluoro modified nucleotide with phosphorothioate linkage
  modified_base 19: mod_base = OTHER; note = 2'-O-methyl modified nucleotide with phosphorothioate linkage
  modified_base 20: mod_base = OTHER; note = 2'-O-methyl modified nucleotide
  modified_base 21: mod_base = OTHER; note = 2'-fluoro modified nucleotide
  modified_base 22: mod_base = OTHER; note = 2'-O-methyl modified nucleotide
  modified_base 23: mod_base = OTHER; note = 2'-fluoro modified nucleotide
  modified_base 24: mod_base = OTHER; note = 2'-O-methyl modified nucleotide
  modified_base 25: mod_base = OTHER; note = 2'-fluoro modified nucleotide
  modified_base 26: mod_base = OTHER; note = 2'-O-methyl modified nucleotide
  modified_base 27: mod_base = OTHER; note = 2'-fluoro modified nucleotide
  modified_base 28: mod_base = OTHER; note = 2'-O-methyl modified nucleotide
  modified_base 29: mod_base = OTHER; note = 2'-fluoro modified nucleotide
  modified_base 30: mod_base = OTHER; note = 2'-O-methyl modified nucleotide
  modified_base 31: mod_base = OTHER; note = 2'-fluoro modified nucleotide with phosphorothioate linkage
  modified_base 32: mod_base = OTHER; note = 2'-O-methyl modified nucleotide with phosphorothioate linkage
  modified_base 33: mod_base = OTHER; note = 2'-fluoro trivalent N-acetylgalactosamine modified nucleotide
ngaatcttgaagtcaggaagacttcaagattca

SEQ ID NO: 1961 - RNA, 33 nt, synthetic construct
  source 1..33: mol_type = other RNA
  misc_difference 1: note = 2'-O-methyl modified nucleotide with phosphorothioate linkage may be 5' phosphate modified
  modified_base 2: mod_base = OTHER; note = 2'-fluoro modified nucleotide with phosphorothioate linkage
  modified_base 3: mod_base = OTHER; note = 2'-O-methyl modified nucleotide
  modified_base 4: mod_base = OTHER; note = 2'-fluoro modified nucleotide
  modified_base 5: mod_base = OTHER; note = 2'-O-methyl modified nucleotide
  modified_base 6: mod_base = OTHER; note = 2'-fluoro modified nucleotide
  modified_base 7: mod_base = OTHER; note = 2'-O-methyl modified nucleotide
  modified_base 8: mod_base = OTHER; note = 2'-fluoro modified nucleotide
  modified_base 9: mod_base = OTHER; note = 2'-O-methyl modified nucleotide
  modified_base 10: mod_base = OTHER; note = 2'-fluoro modified nucleotide
  modified_base 11: mod_base = OTHER; note = 2'-O-methyl modified nucleotide
  modified_base 12: mod_base = OTHER; note = 2'-fluoro modified nucleotide
  modified_base 13: mod_base = OTHER; note = 2'-O-methyl modified nucleotide
  modified_base 14: mod_base = OTHER; note = 2'-fluoro modified nucleotide with phosphorothioate linkage
  modified_base 15: mod_base = OTHER; note = 2'-O-methyl modified nucleotide with phosphorothioate linkage
  modified_base 16: mod_base = OTHER; note = 2'-fluoro modified nucleotide with phosphorothioate linkage
  modified_base 17: mod_base = OTHER; note = 2'-O-methyl modified nucleotide with phosphorothioate linkage
  modified_base 18: mod_base = OTHER; note = 2'-fluoro modified nucleotide with phosphorothioate linkage
  modified_base 19: mod_base = OTHER; note = 2'-O-methyl modified nucleotide with phosphorothioate linkage
  modified_base 20: mod_base = OTHER; note = 2'-O-methyl modified nucleotide
  modified_base 21: mod_base = OTHER; note = 2'-fluoro modified nucleotide
  modified_base 22: mod_base = OTHER; note = 2'-O-methyl modified nucleotide
  modified_base 23: mod_base = OTHER; note = 2'-fluoro modified nucleotide
  modified_base 24: mod_base = OTHER; note = 2'-O-methyl modified nucleotide
  modified_base 25: mod_base = OTHER; note = 2'-fluoro modified nucleotide
  modified_base 26: mod_base = OTHER; note = 2'-O-methyl modified nucleotide
  modified_base 27: mod_base = OTHER; note = 2'-fluoro modified nucleotide
  modified_base 28: mod_base = OTHER; note = 2'-O-methyl modified nucleotide
  modified_base 29: mod_base = OTHER; note = 2'-fluoro modified nucleotide
  modified_base 30: mod_base = OTHER; note = 2'-O-methyl modified nucleotide
  modified_base 31: mod_base = OTHER; note = 2'-fluoro modified nucleotide with phosphorothioate linkage
  modified_base 32: mod_base = OTHER; note = 2'-O-methyl modified nucleotide with phosphorothioate linkage
  modified_base 33: mod_base = OTHER; note = 2'-fluoro trivalent N-acetylgalactosamine modified nucleotide
ntgggcttgtagctggcacagctacaagcccaa

SEQ ID NO: 1962 - RNA, 33 nt, synthetic construct
  source 1..33: mol_type = other RNA
  misc_difference 1: note = 2'-O-methyl modified nucleotide with phosphorothioate linkage may be 5' phosphate modified
  modified_base 2: mod_base = OTHER; note = 2'-fluoro modified nucleotide with phosphorothioate linkage
  modified_base 3: mod_base = OTHER; note = 2'-O-methyl modified nucleotide
  modified_base 4: mod_base = OTHER; note = 2'-fluoro modified nucleotide
  modified_base 5: mod_base = OTHER; note = 2'-O-methyl modified nucleotide
  modified_base 6: mod_base = OTHER; note = 2'-fluoro modified nucleotide
  modified_base 7: mod_base = OTHER; note = 2'-O-methyl modified nucleotide
  modified_base 8: mod_base = OTHER; note = 2'-fluoro modified nucleotide
  modified_base 9: mod_base = OTHER; note = 2'-O-methyl modified nucleotide
  modified_base 10: mod_base = OTHER; note = 2'-fluoro modified nucleotide
  modified_base 11: mod_base = OTHER; note = 2'-O-methyl modified nucleotide
  modified_base 12: mod_base = OTHER; note = 2'-fluoro modified nucleotide
  modified_base 13: mod_base = OTHER; note = 2'-O-methyl modified nucleotide
  modified_base 14: mod_base = OTHER; note = 2'-fluoro modified nucleotide with phosphorothioate linkage
  modified_base 15: mod_base = OTHER; note = 2'-O-methyl modified nucleotide with phosphorothioate linkage
  modified_base 16: mod_base = OTHER; note = 2'-fluoro modified nucleotide with phosphorothioate linkage
  modified_base 17: mod_base = OTHER; note = 2'-O-methyl modified nucleotide with phosphorothioate linkage
  modified_base 18: mod_base = OTHER; note = 2'-fluoro modified nucleotide with phosphorothioate linkage
  modified_base 19: mod_base = OTHER; note = 2'-O-methyl modified nucleotide with phosphorothioate linkage
  modified_base 20: mod_base = OTHER; note = 2'-O-methyl modified nucleotide
  modified_base 21: mod_base = OTHER; note = 2'-fluoro modified nucleotide
  modified_base 22: mod_base = OTHER; note = 2'-O-methyl modified nucleotide
  modified_base 23: mod_base = OTHER; note = 2'-fluoro modified nucleotide
  modified_base 24: mod_base = OTHER; note = 2'-O-methyl modified nucleotide
  modified_base 25: mod_base = OTHER; note = 2'-fluoro modified nucleotide
  modified_base 26: mod_base = OTHER; note = 2'-O-methyl modified nucleotide
  modified_base 27: mod_base = OTHER; note = 2'-fluoro modified nucleotide
  modified_base 28: mod_base = OTHER; note = 2'-O-methyl modified nucleotide
  modified_base 29: mod_base = OTHER; note = 2'-fluoro modified nucleotide
  modified_base 30: mod_base = OTHER; note = 2'-O-methyl modified nucleotide
  modified_base 31: mod_base = OTHER; note = 2'-fluoro modified nucleotide with phosphorothioate linkage
  modified_base 32: mod_base = OTHER; note = 2'-O-methyl modified nucleotide with phosphorothioate linkage
  modified_base 33: mod_base = OTHER; note = 2'-fluoro trivalent N-acetylgalactosamine modified nucleotide
ncaagtaattatagtgagtctataattacttga

SEQ ID NO: 1963 - RNA, 33 nt, synthetic construct
  source 1..33: mol_type = other RNA
  misc_difference 1: note = 2'-O-methyl modified nucleotide with phosphorothioate linkage may be 5' phosphate modified
  modified_base 2: mod_base = OTHER; note = 2'-fluoro modified nucleotide with phosphorothioate linkage
  modified_base 3: mod_base = OTHER; note = 2'-O-methyl modified nucleotide
  modified_base 4: mod_base = OTHER; note = 2'-fluoro modified nucleotide
  modified_base 5: mod_base = OTHER; note = 2'-O-methyl modified nucleotide
  modified_base 6: mod_base = OTHER; note = 2'-fluoro modified nucleotide
  modified_base 7: mod_base = OTHER; note = 2'-O-methyl modified nucleotide
  modified_base 8: mod_base = OTHER; note = 2'-fluoro modified nucleotide
  modified_base 9: mod_base = OTHER; note = 2'-O-methyl modified nucleotide
  modified_base 10: mod_base = OTHER; note = 2'-fluoro modified nucleotide
  modified_base 11: mod_base = OTHER; note = 2'-O-methyl modified nucleotide
  modified_base 12: mod_base = OTHER; note = 2'-fluoro modified nucleotide
  modified_base 13: mod_base = OTHER; note = 2'-O-methyl modified nucleotide
  modified_base 14: mod_base = OTHER; note = 2'-fluoro modified nucleotide with phosphorothioate linkage
  modified_base 15: mod_base = OTHER; note = 2'-O-methyl modified nucleotide with phosphorothioate linkage
  modified_base 16: mod_base = OTHER; note = 2'-fluoro modified nucleotide with phosphorothioate linkage
  modified_base 17: mod_base = OTHER; note = 2'-O-methyl modified nucleotide with phosphorothioate linkage
  modified_base 18: mod_base = OTHER; note = 2'-fluoro modified nucleotide with phosphorothioate linkage
  modified_base 19: mod_base = OTHER; note = 2'-O-methyl modified nucleotide with phosphorothioate linkage
  modified_base 20: mod_base = OTHER; note = 2'-O-methyl modified nucleotide
  modified_base 21: mod_base = OTHER; note = 2'-fluoro modified nucleotide
  modified_base 22: mod_base = OTHER; note = 2'-O-methyl modified nucleotide
  modified_base 23: mod_base = OTHER; note = 2'-fluoro modified nucleotide
  modified_base 24: mod_base = OTHER; note = 2'-O-methyl modified nucleotide
  modified_base 25: mod_base = OTHER; note = 2'-fluoro modified nucleotide
  modified_base 26: mod_base = OTHER; note = 2'-O-methyl modified nucleotide
  modified_base 27: mod_base = OTHER; note = 2'-fluoro modified nucleotide
  modified_base 28: mod_base = OTHER; note = 2'-O-methyl modified nucleotide
  modified_base 29: mod_base = OTHER; note = 2'-fluoro modified nucleotide
  modified_base 30: mod_base = OTHER; note = 2'-O-methyl modified nucleotide
  modified_base 31: mod_base = OTHER; note = 2'-fluoro modified nucleotide with phosphorothioate linkage
  modified_base 32: mod_base = OTHER; note = 2'-O-methyl modified nucleotide with phosphorothioate linkage
  modified_base 33: mod_base = OTHER; note = 2'-fluoro trivalent N-acetylgalactosamine modified nucleotide
naacaggtttgtctgtatgagacaaacctgtta

SEQ ID NO: 1964 - RNA, 33 nt, synthetic construct
  source 1..33: mol_type = other RNA
  misc_difference 1: note = 2'-O-methyl modified nucleotide with phosphorothioate linkage may be 5' phosphate modified
  modified_base 2: mod_base = OTHER; note = 2'-fluoro modified nucleotide with phosphorothioate linkage
  modified_base 3: mod_base = OTHER; note = 2'-O-methyl modified nucleotide
  modified_base 4: mod_base = OTHER; note = 2'-fluoro modified nucleotide
  modified_base 5: mod_base = OTHER; note = 2'-O-methyl modified nucleotide
  modified_base 6: mod_base = OTHER; note = 2'-fluoro modified nucleotide
  modified_base 7: mod_base = OTHER; note = 2'-O-methyl modified nucleotide
  modified_base 8: mod_base = OTHER; note = 2'-fluoro modified nucleotide
  modified_base 9: mod_base = OTHER; note = 2'-O-methyl modified nucleotide
  modified_base 10: mod_base = OTHER; note = 2'-fluoro modified nucleotide
  modified_base 11: mod_base = OTHER; note = 2'-O-methyl modified nucleotide
  modified_base 12: mod_base = OTHER; note = 2'-fluoro modified nucleotide
  modified_base 13: mod_base = OTHER; note = 2'-O-methyl modified nucleotide
  modified_base 14: mod_base = OTHER; note = 2'-fluoro modified nucleotide with phosphorothioate linkage
  modified_base 15: mod_base = OTHER; note = 2'-O-methyl modified nucleotide with phosphorothioate linkage
  modified_base 16: mod_base = OTHER; note = 2'-fluoro modified nucleotide with phosphorothioate linkage
  modified_base 17: mod_base = OTHER; note = 2'-O-methyl modified nucleotide with phosphorothioate linkage
  modified_base 18: mod_base = OTHER; note = 2'-fluoro modified nucleotide with phosphorothioate linkage
  modified_base 19: mod_base = OTHER; note = 2'-O-methyl modified nucleotide with phosphorothioate linkage
  modified_base 20: mod_base = OTHER; note = 2'-O-methyl modified nucleotide
  modified_base 21: mod_base = OTHER; note = 2'-fluoro modified nucleotide
  modified_base 22: mod_base = OTHER; note = 2'-O-methyl modified nucleotide
  modified_base 23: mod_base = OTHER; note = 2'-fluoro modified nucleotide
  modified_base 24: mod_base = OTHER; note = 2'-O-methyl modified nucleotide
  modified_base 25: mod_base = OTHER; note = 2'-fluoro modified nucleotide
  modified_base 26: mod_base = OTHER; note = 2'-O-methyl modified nucleotide
  modified_base 27: mod_base = OTHER; note = 2'-fluoro modified nucleotide
  modified_base 28: mod_base = OTHER; note = 2'-O-methyl modified nucleotide
  modified_base 29: mod_base = OTHER; note = 2'-fluoro modified nucleotide
  modified_base 30: mod_base = OTHER; note = 2'-O-methyl modified nucleotide
  modified_base 31: mod_base = OTHER; note = 2'-fluoro modified nucleotide with phosphorothioate linkage
  modified_base 32: mod_base = OTHER; note = 2'-O-methyl modified nucleotide with phosphorothioate linkage
  modified_base 33: mod_base = OTHER; note = 2'-fluoro trivalent N-acetylgalactosamine modified nucleotide
ncagacattttaacacagagttaaaatgtctga

SEQ ID NO: 1965 - RNA, 33 nt, synthetic construct
  source 1..33: mol_type = other RNA
  misc_difference 1: note = 2'-O-methyl modified nucleotide with phosphorothioate linkage may be 5' phosphate modified
  modified_base 2: mod_base = OTHER; note = 2'-fluoro modified nucleotide with phosphorothioate linkage
  modified_base 3: mod_base = OTHER; note = 2'-O-methyl modified nucleotide
  modified_base 4: mod_base = OTHER; note = 2'-fluoro modified nucleotide
  modified_base 5: mod_base = OTHER; note = 2'-O-methyl modified nucleotide
  modified_base 6: mod_base = OTHER; note = 2'-fluoro modified nucleotide
  modified_base 7: mod_base = OTHER; note = 2'-O-methyl modified nucleotide
  modified_base 8: mod_base = OTHER; note = 2'-fluoro modified nucleotide
  modified_base 9: mod_base = OTHER; note = 2'-O-methyl modified nucleotide
  modified_base 10: mod_base = OTHER; note = 2'-fluoro modified nucleotide
  modified_base 11: mod_base = OTHER; note = 2'-O-methyl modified nucleotide
  modified_base 12: mod_base = OTHER; note = 2'-fluoro modified nucleotide
  modified_base 13: mod_base = OTHER; note = 2'-O-methyl modified nucleotide
  modified_base 14: mod_base = OTHER; note = 2'-fluoro modified nucleotide with phosphorothioate linkage
  modified_base 15: mod_base = OTHER; note = 2'-O-methyl modified nucleotide with phosphorothioate linkage
  modified_base 16: mod_base = OTHER; note = 2'-fluoro modified nucleotide with phosphorothioate linkage
  modified_base 17: mod_base = OTHER; note = 2'-O-methyl modified nucleotide with phosphorothioate linkage
  modified_base 18: mod_base = OTHER; note = 2'-fluoro modified nucleotide with phosphorothioate linkage
  modified_base 19: mod_base = OTHER; note = 2'-O-methyl modified nucleotide with phosphorothioate linkage
  modified_base 20: mod_base = OTHER; note = 2'-O-methyl modified nucleotide
  modified_base 21: mod_base = OTHER; note = 2'-fluoro modified nucleotide
  modified_base 22: mod_base = OTHER; note = 2'-O-methyl modified nucleotide
  modified_base 23: mod_base = OTHER; note = 2'-fluoro modified nucleotide
  modified_base 24: mod_base = OTHER; note = 2'-O-methyl modified nucleotide
  modified_base 25: mod_base = OTHER; note = 2'-fluoro modified nucleotide
  modified_base 26: mod_base = OTHER; note = 2'-O-methyl modified nucleotide
  modified_base 27: mod_base = OTHER; note = 2'-fluoro modified nucleotide
  modified_base 28: mod_base = OTHER; note = 2'-O-methyl modified nucleotide
  modified_base 29: mod_base = OTHER; note = 2'-fluoro modified nucleotide
  modified_base 30: mod_base = OTHER; note = 2'-O-methyl modified nucleotide
  modified_base 31: mod_base = OTHER; note = 2'-fluoro modified nucleotide with phosphorothioate linkage
  modified_base 32: mod_base = OTHER; note = 2'-O-methyl modified nucleotide with phosphorothioate linkage
  modified_base 33: mod_base = OTHER; note = 2'-fluoro trivalent N-acetylgalactosamine modified nucleotide
ncctggagctggttgccacaaccagctccagga

SEQ ID NO: 1966 - RNA, 33 nt, synthetic construct
  source 1..33: mol_type = other RNA
  misc_difference 1: note = 2'-O-methyl modified nucleotide with phosphorothioate linkage may be 5' phosphate modified
  modified_base 2: mod_base = OTHER; note = 2'-fluoro modified nucleotide with phosphorothioate linkage
  modified_base 3: mod_base = OTHER; note = 2'-O-methyl modified nucleotide
  modified_base 4: mod_base = OTHER; note = 2'-fluoro modified nucleotide
  modified_base 5: mod_base = OTHER; note = 2'-O-methyl modified nucleotide
  modified_base 6: mod_base = OTHER; note = 2'-fluoro modified nucleotide
  modified_base 7: mod_base = OTHER; note = 2'-O-methyl modified nucleotide
  modified_base 8: mod_base = OTHER; note = 2'-fluoro modified nucleotide
  modified_base 9: mod_base = OTHER; note = 2'-O-methyl modified nucleotide
  modified_base 10: mod_base = OTHER; note = 2'-fluoro modified nucleotide
  modified_base 11: mod_base = OTHER; note = 2'-O-methyl modified nucleotide
  modified_base 12: mod_base = OTHER; note = 2'-fluoro modified nucleotide
  modified_base 13: mod_base = OTHER; note = 2'-O-methyl modified nucleotide
  modified_base 14: mod_base = OTHER; note = 2'-fluoro modified nucleotide with phosphorothioate linkage
  modified_base 15: mod_base = OTHER; note = 2'-O-methyl modified nucleotide with phosphorothioate linkage
  modified_base 16: mod_base = OTHER; note = 2'-fluoro modified nucleotide with phosphorothioate linkage
  modified_base 17: mod_base = OTHER; note = 2'-O-methyl modified nucleotide with phosphorothioate linkage
  modified_base 18: mod_base = OTHER; note = 2'-fluoro modified nucleotide with phosphorothioate linkage
  modified_base 19: mod_base = OTHER; note = 2'-O-methyl modified nucleotide with phosphorothioate linkage
  modified_base 20: mod_base = OTHER; note = 2'-O-methyl modified nucleotide
  modified_base 21: mod_base = OTHER; note = 2'-fluoro modified nucleotide
  modified_base 22: mod_base = OTHER; note = 2'-O-methyl modified nucleotide
  modified_base 23: mod_base = OTHER; note = 2'-fluoro modified nucleotide
  modified_base 24: mod_base = OTHER; note = 2'-O-methyl modified nucleotide
  modified_base 25: mod_base = OTHER; note = 2'-fluoro modified nucleotide
  modified_base 26: mod_base = OTHER; note = 2'-O-methyl modified nucleotide
  modified_base 27: mod_base = OTHER; note = 2'-fluoro modified nucleotide
  modified_base 28: mod_base = OTHER; note = 2'-O-methyl modified nucleotide
  modified_base 29: mod_base = OTHER; note = 2'-fluoro modified nucleotide
  modified_base 30: mod_base = OTHER; note = 2'-O-methyl modified nucleotide
  modified_base 31: mod_base = OTHER; note = 2'-fluoro modified nucleotide with phosphorothioate linkage
  modified_base 32: mod_base = OTHER; note = 2'-O-methyl modified nucleotide with phosphorothioate linkage
  modified_base 33: mod_base = OTHER; note = 2'-fluoro trivalent N-acetylgalactosamine modified nucleotide
nataaaatcaagtaattattacttgattttata

SEQ ID NO: 1967 - RNA, 33 nt, synthetic construct
  source 1..33: mol_type = other RNA
  misc_difference 1: note = 2'-O-methyl modified nucleotide with phosphorothioate linkage may be 5' phosphate modified
  modified_base 2: mod_base = OTHER; note = 2'-fluoro modified nucleotide with phosphorothioate linkage
  modified_base 3: mod_base = OTHER; note = 2'-O-methyl modified nucleotide
  modified_base 4: mod_base = OTHER; note = 2'-fluoro modified nucleotide
  modified_base 5: mod_base = OTHER; note = 2'-O-methyl modified nucleotide
  modified_base 6: mod_base = OTHER; note = 2'-fluoro modified nucleotide
  modified_base 7: mod_base = OTHER; note = 2'-O-methyl modified nucleotide
  modified_base 8: mod_base = OTHER; note = 2'-fluoro modified nucleotide
  modified_base 9: mod_base = OTHER; note = 2'-O-methyl modified nucleotide
  modified_base 10: mod_base = OTHER; note = 2'-fluoro modified nucleotide
  modified_base 11: mod_base = OTHER; note = 2'-O-methyl modified nucleotide
  modified_base 12: mod_base = OTHER; note = 2'-fluoro modified nucleotide
  modified_base 13: mod_base = OTHER; note = 2'-O-methyl modified nucleotide
  modified_base 14: mod_base = OTHER; note = 2'-fluoro modified nucleotide with phosphorothioate linkage
  modified_base 15: mod_base = OTHER; note = 2'-O-methyl modified nucleotide with phosphorothioate linkage
  modified_base 16: mod_base = OTHER; note = 2'-fluoro modified nucleotide with phosphorothioate linkage
  modified_base 17: mod_base = OTHER; note = 2'-O-methyl modified nucleotide with phosphorothioate linkage
  modified_base 18: mod_base = OTHER; note = 2'-fluoro modified nucleotide with phosphorothioate linkage
  modified_base 19: mod_base = OTHER; note = 2'-O-methyl modified nucleotide with phosphorothioate linkage
  modified_base 20: mod_base = OTHER; note = 2'-O-methyl modified nucleotide
  modified_base 21: mod_base = OTHER; note = 2'-fluoro modified nucleotide
  modified_base 22: mod_base = OTHER; note = 2'-O-methyl modified nucleotide
  modified_base 23: mod_base = OTHER; note = 2'-fluoro modified nucleotide
  modified_base 24: mod_base = OTHER; note = 2'-O-methyl modified nucleotide
  modified_base 25: mod_base = OTHER; note = 2'-fluoro modified nucleotide
  modified_base 26: mod_base = OTHER; note = 2'-O-methyl modified nucleotide
  modified_base 27: mod_base = OTHER; note = 2'-fluoro modified nucleotide
  modified_base 28: mod_base = OTHER; note = 2'-O-methyl modified nucleotide
  modified_base 29: mod_base = OTHER; note = 2'-fluoro modified nucleotide
  modified_base 30: mod_base = OTHER; note = 2'-O-methyl modified nucleotide
  modified_base 31: mod_base = OTHER; note = 2'-fluoro modified nucleotide with phosphorothioate linkage
  modified_base 32: mod_base = OTHER; note = 2'-O-methyl modified nucleotide with phosphorothioate linkage
  modified_base 33: mod_base = OTHER; note = 2'-fluoro trivalent N-acetylgalactosamine modified nucleotide
nacacagtttggcctggagggccaaactgtgta

SEQ ID NO: 1968 - RNA, 33 nt, synthetic construct
  source 1..33: mol_type = other RNA
  misc_difference 1: note = 2'-O-methyl modified nucleotide with phosphorothioate linkage may be 5' phosphate modified
  modified_base 2: mod_base = OTHER; note = 2'-fluoro modified nucleotide with phosphorothioate linkage
  modified_base 3: mod_base = OTHER; note = 2'-O-methyl modified nucleotide
  modified_base 4: mod_base = OTHER; note = 2'-fluoro modified nucleotide
  modified_base 5: mod_base = OTHER; note = 2'-O-methyl modified nucleotide
  modified_base 6: mod_base = OTHER; note = 2'-fluoro modified nucleotide
  modified_base 7: mod_base = OTHER; note = 2'-O-methyl modified nucleotide
  modified_base 8: mod_base = OTHER; note = 2'-fluoro modified nucleotide
  modified_base 9: mod_base = OTHER; note = 2'-O-methyl modified nucleotide
  modified_base 10: mod_base = OTHER; note = 2'-fluoro modified nucleotide
  modified_base 11: mod_base = OTHER; note = 2'-O-methyl modified nucleotide
  modified_base 12: mod_base = OTHER; note = 2'-fluoro modified nucleotide
  modified_base 13: mod_base = OTHER; note = 2'-O-methyl modified nucleotide
  modified_base 14: mod_base = OTHER; note = 2'-fluoro modified nucleotide with phosphorothioate linkage
  modified_base 15: mod_base = OTHER; note = 2'-O-methyl modified nucleotide with phosphorothioate linkage
  modified_base 16: mod_base = OTHER; note = 2'-fluoro modified nucleotide with phosphorothioate linkage
  modified_base 17: mod_base = OTHER; note = 2'-O-methyl modified nucleotide with phosphorothioate linkage
  modified_base 18: mod_base = OTHER; note = 2'-fluoro modified nucleotide with phosphorothioate linkage
  modified_base 19: mod_base = OTHER; note = 2'-O-methyl modified nucleotide with phosphorothioate linkage
  modified_base 20: mod_base = OTHER; note = 2'-O-methyl modified nucleotide
  modified_base 21: mod_base = OTHER; note = 2'-fluoro modified nucleotide
  modified_base 22: mod_base = OTHER; note = 2'-O-methyl modified nucleotide
  modified_base 23: mod_base = OTHER; note = 2'-fluoro modified nucleotide
  modified_base 24: mod_base = OTHER; note = 2'-O-methyl modified nucleotide
  modified_base 25: mod_base = OTHER; note = 2'-fluoro modified nucleotide
  modified_base 26: mod_base = OTHER; note = 2'-O-methyl modified nucleotide
  modified_base 27: mod_base = OTHER; note = 2'-fluoro modified nucleotide
  modified_base 28: mod_base = OTHER; note = 2'-O-methyl modified nucleotide
  modified_base 29: mod_base = OTHER; note = 2'-fluoro modified nucleotide
  modified_base 30: mod_base = OTHER; note = 2'-O-methyl modified nucleotide
  modified_base 31: mod_base = OTHER; note = 2'-fluoro modified nucleotide with phosphorothioate linkage
  modified_base 32: mod_base = OTHER; note = 2'-O-methyl modified nucleotide with phosphorothioate linkage
  modified_base 33: mod_base = OTHER; note = 2'-fluoro trivalent N-acetylgalactosamine modified nucleotide
nggaatcttgaagtcaggaacttcaagattcca

SEQ ID NO: 1969 - RNA, 33 nt, synthetic construct
  source 1..33: mol_type = other RNA
  misc_difference 1: note = 2'-O-methyl modified nucleotide with phosphorothioate linkage may be 5' phosphate modified
  modified_base 2: mod_base = OTHER; note = 2'-fluoro modified nucleotide with phosphorothioate linkage
  modified_base 3: mod_base = OTHER; note = 2'-O-methyl modified nucleotide
  modified_base 4: mod_base = OTHER; note = 2'-fluoro modified nucleotide
  modified_base 5: mod_base = OTHER; note = 2'-O-methyl modified nucleotide
  modified_base 6: mod_base = OTHER; note = 2'-fluoro modified nucleotide
  modified_base 7: mod_base = OTHER; note = 2'-O-methyl modified nucleotide
  modified_base 8: mod_base = OTHER; note = 2'-fluoro modified nucleotide
  modified_base 9: mod_base = OTHER; note = 2'-O-methyl modified nucleotide
  modified_base 10: mod_base = OTHER; note = 2'-fluoro modified nucleotide
  modified_base 11: mod_base = OTHER; note = 2'-O-methyl modified nucleotide
  modified_base 12: mod_base = OTHER; note = 2'-fluoro modified nucleotide
  modified_base 13: mod_base = OTHER; note = 2'-O-methyl modified nucleotide
  modified_base 14: mod_base = OTHER; note = 2'-fluoro modified nucleotide with phosphorothioate linkage
  modified_base 15: mod_base = OTHER; note = 2'-O-methyl modified nucleotide with phosphorothioate linkage
  modified_base 16: mod_base = OTHER; note = 2'-fluoro modified nucleotide with phosphorothioate linkage
  modified_base 17: mod_base = OTHER; note = 2'-O-methyl modified nucleotide with phosphorothioate linkage
  modified_base 18: mod_base = OTHER; note = 2'-fluoro modified nucleotide with phosphorothioate linkage
  modified_base 19: mod_base = OTHER; note = 2'-O-methyl modified nucleotide with phosphorothioate linkage
  modified_base 20: mod_base = OTHER; note = 2'-O-methyl modified nucleotide
  modified_base 21: mod_base = OTHER; note = 2'-fluoro modified nucleotide
  modified_base 22: mod_base = OTHER; note = 2'-O-methyl modified nucleotide
  modified_base 23: mod_base = OTHER; note = 2'-fluoro modified nucleotide
  modified_base 24: mod_base = OTHER; note = 2'-O-methyl modified nucleotide
  modified_base 25: mod_base = OTHER; note = 2'-fluoro modified nucleotide
  modified_base 26: mod_base = OTHER; note = 2'-O-methyl modified nucleotide
  modified_base 27: mod_base = OTHER; note = 2'-fluoro modified nucleotide
  modified_base 28: mod_base = OTHER; note = 2'-O-methyl modified nucleotide
  modified_base 29: mod_base = OTHER; note = 2'-fluoro modified nucleotide
  modified_base 30: mod_base = OTHER; note = 2'-O-methyl modified nucleotide
  modified_base 31: mod_base = OTHER; note = 2'-fluoro modified nucleotide with phosphorothioate linkage
  modified_base 32: mod_base = OTHER; note = 2'-O-methyl modified nucleotide with phosphorothioate linkage
  modified_base 33: mod_base = OTHER; note = 2'-fluoro trivalent N-acetylgalactosamine modified nucleotide
ngacattttaacacagaacgtgttaaaatgtca

SEQ ID NO: 1970 - RNA, 33 nt, synthetic construct
  source 1..33: mol_type = other RNA
  misc_difference 1: note = 2'-O-methyl modified nucleotide with phosphorothioate linkage may be 5' phosphate modified
  modified_base 2: mod_base = OTHER; note = 2'-fluoro modified nucleotide with phosphorothioate linkage
  modified_base 3: mod_base = OTHER; note = 2'-O-methyl modified nucleotide
  modified_base 4: mod_base = OTHER; note = 2'-fluoro modified nucleotide
  modified_base 5: mod_base = OTHER; note = 2'-O-methyl modified nucleotide
  modified_base 6: mod_base = OTHER; note = 2'-fluoro modified nucleotide
  modified_base 7: mod_base = OTHER; note = 2'-O-methyl modified nucleotide
  modified_base 8: mod_base = OTHER; note = 2'-fluoro modified nucleotide
  modified_base 9: mod_base = OTHER; note = 2'-O-methyl modified nucleotide
  modified_base 10: mod_base = OTHER; note = 2'-fluoro modified nucleotide
  modified_base 11: mod_base = OTHER; note = 2'-O-methyl modified nucleotide
  modified_base 12: mod_base = OTHER; note = 2'-fluoro modified nucleotide
  modified_base 13: mod_base = OTHER; note = 2'-O-methyl modified nucleotide
  modified_base 14: mod_base = OTHER; note = 2'-fluoro modified nucleotide with phosphorothioate linkage
  modified_base 15: mod_base = OTHER; note = 2'-O-methyl modified nucleotide with phosphorothioate linkage
  modified_base 16: mod_base = OTHER; note = 2'-fluoro modified nucleotide with phosphorothioate linkage
  modified_base 17: mod_base = OTHER; note = 2'-O-methyl modified nucleotide with phosphorothioate linkage
  modified_base 18: mod_base = OTHER; note = 2'-fluoro modified nucleotide with phosphorothioate linkage
  modified_base 19: mod_base = OTHER; note = 2'-O-methyl modified nucleotide with phosphorothioate linkage
  modified_base 20: mod_base = OTHER; note = 2'-O-methyl modified nucleotide
  modified_base 21: mod_base = OTHER; note = 2'-fluoro modified nucleotide
  modified_base 22: mod_base = OTHER; note = 2'-O-methyl modified nucleotide
  modified_base 23: mod_base = OTHER; note = 2'-fluoro modified nucleotide
  modified_base 24: mod_base = OTHER; note = 2'-O-methyl modified nucleotide
  modified_base 25: mod_base = OTHER; note = 2'-fluoro modified nucleotide
  modified_base 26: mod_base = OTHER; note = 2'-O-methyl modified nucleotide
  modified_base 27: mod_base = OTHER; note = 2'-fluoro modified nucleotide
  modified_base 28: mod_base = OTHER; note = 2'-O-methyl modified nucleotide
  modified_base 29: mod_base = OTHER; note = 2'-fluoro modified nucleotide
  modified_base 30: mod_base = OTHER; note = 2'-O-methyl modified nucleotide
  modified_base 31: mod_base = OTHER; note = 2'-fluoro modified nucleotide with phosphorothioate linkage
  modified_base 32: mod_base = OTHER; note = 2'-O-methyl modified nucleotide with phosphorothioate linkage
  modified_base 33: mod_base = OTHER; note = 2'-fluoro trivalent N-acetylgalactosamine modified nucleotide
ngaagtcaggaaaagagatttttcctgacttca

SEQ ID NO: 1971 - RNA, 33 nt, synthetic construct
  source 1..33: mol_type = other RNA
  misc_difference 1: note = 2'-O-methyl modified nucleotide with phosphorothioate linkage may be 5' phosphate modified
  modified_base 2: mod_base = OTHER; note = 2'-fluoro modified nucleotide with phosphorothioate linkage
  modified_base 3: mod_base = OTHER; note = 2'-O-methyl modified nucleotide
  modified_base 4: mod_base = OTHER; note = 2'-fluoro modified nucleotide
  modified_base 5: mod_base = OTHER; note = 2'-O-methyl modified nucleotide
  modified_base 6: mod_base = OTHER; note = 2'-fluoro modified nucleotide
  modified_base 7: mod_base = OTHER; note = 2'-O-methyl modified nucleotide
  modified_base 8: mod_base = OTHER; note = 2'-fluoro modified nucleotide
  modified_base 9: mod_base = OTHER; note = 2'-O-methyl modified nucleotide
  modified_base 10: mod_base = OTHER; note = 2'-fluoro modified nucleotide
  modified_base 11: mod_base = OTHER; note = 2'-O-methyl modified nucleotide
  modified_base 12: mod_base = OTHER; note = 2'-fluoro modified nucleotide
  modified_base 13: mod_base = OTHER; note = 2'-O-methyl modified nucleotide
  modified_base 14: mod_base = OTHER; note = 2'-fluoro modified nucleotide with phosphorothioate linkage
  modified_base 15: mod_base = OTHER; note = 2'-O-methyl modified nucleotide with phosphorothioate linkage
  modified_base 16: mod_base = OTHER; note = 2'-fluoro modified nucleotide with phosphorothioate linkage
  modified_base 17: mod_base = OTHER; note = 2'-O-methyl modified nucleotide with phosphorothioate linkage
  modified_base 18: mod_base = OTHER; note = 2'-fluoro modified nucleotide with phosphorothioate linkage
  modified_base 19: mod_base = OTHER; note = 2'-O-methyl modified nucleotide with phosphorothioate linkage
  modified_base 20: mod_base = OTHER; note = 2'-O-methyl modified nucleotide
  modified_base 21: mod_base = OTHER; note = 2'-fluoro modified nucleotide
  modified_base 22: mod_base = OTHER; note = 2'-O-methyl modified nucleotide
  modified_base 23: mod_base = OTHER; note = 2'-fluoro modified nucleotide
  modified_base 24: mod_base = OTHER; note = 2'-O-methyl modified nucleotide
  modified_base 25: mod_base = OTHER; note = 2'-fluoro modified nucleotide
  modified_base 26: mod_base = OTHER; note = 2'-O-methyl modified nucleotide
  modified_base 27: mod_base = OTHER; note = 2'-fluoro modified nucleotide
  modified_base 28: mod_base = OTHER; note = 2'-O-methyl modified nucleotide
  modified_base 29: mod_base = OTHER; note = 2'-fluoro modified nucleotide
  modified_base 30: mod_base = OTHER; note = 2'-O-methyl modified nucleotide
  modified_base 31: mod_base = OTHER; note = 2'-fluoro modified nucleotide with phosphorothioate linkage
  modified_base 32: mod_base = OTHER; note = 2'-O-methyl modified nucleotide with phosphorothioate linkage
  modified_base 33: mod_base = OTHER; note = 2'-fluoro trivalent N-acetylgalactosamine modified nucleotide
nacagtttggcctggagaacaggccaaactgta

SEQ ID NO: 1972 - RNA, 33 nt, synthetic construct
  source 1..33: mol_type = other RNA
  misc_difference 1: note = 2'-O-methyl modified nucleotide with phosphorothioate linkage may be 5' phosphate modified
  modified_base 2: mod_base = OTHER; note = 2'-fluoro modified nucleotide with phosphorothioate linkage
  modified_base 3: mod_base = OTHER; note = 2'-O-methyl modified nucleotide
  modified_base 4: mod_base = OTHER; note = 2'-fluoro modified nucleotide
  modified_base 5: mod_base = OTHER; note = 2'-O-methyl modified nucleotide
  modified_base 6: mod_base = OTHER; note = 2'-fluoro modified nucleotide
  modified_base 7: mod_base = OTHER; note = 2'-O-methyl modified nucleotide
  modified_base 8: mod_base = OTHER; note = 2'-fluoro modified nucleotide
  modified_base 9: mod_base = OTHER; note = 2'-O-methyl modified nucleotide
  modified_base 10: mod_base = OTHER; note = 2'-fluoro modified nucleotide
  modified_base 11: mod_base = OTHER; note = 2'-O-methyl modified nucleotide
  modified_base 12: mod_base = OTHER; note = 2'-fluoro modified nucleotide
  modified_base 13: mod_base = OTHER; note = 2'-O-methyl modified nucleotide
  modified_base 14: mod_base = OTHER; note = 2'-fluoro modified nucleotide with phosphorothioate linkage
  modified_base 15: mod_base = OTHER; note = 2'-O-methyl modified nucleotide with phosphorothioate linkage
  modified_base 16: mod_base = OTHER; note = 2'-fluoro modified nucleotide with phosphorothioate linkage
  modified_base 17: mod_base = OTHER; note = 2'-O-methyl modified nucleotide with phosphorothioate linkage
  modified_base 18: mod_base = OTHER; note = 2'-fluoro modified nucleotide with phosphorothioate linkage
  modified_base 19: mod_base = OTHER; note = 2'-O-methyl modified nucleotide with phosphorothioate linkage
  modified_base 20: mod_base = OTHER; note = 2'-O-methyl modified nucleotide
  modified_base 21: mod_base = OTHER; note = 2'-fluoro modified nucleotide
  modified_base 22: mod_base = OTHER; note = 2'-O-methyl modified nucleotide
  modified_base 23: mod_base = OTHER; note = 2'-fluoro modified nucleotide
  modified_base 24: mod_base = OTHER; note = 2'-O-methyl modified nucleotide
  modified_base 25: mod_base = OTHER; note = 2'-fluoro modified nucleotide
  modified_base 26: mod_base = OTHER; note = 2'-O-methyl modified nucleotide
  modified_base 27: mod_base = OTHER; note = 2'-fluoro modified nucleotide
  modified_base 28: mod_base = OTHER; note = 2'-O-methyl modified nucleotide
  modified_base 29: mod_base = OTHER; note = 2'-fluoro modified nucleotide
  modified_base 30: mod_base = OTHER; note = 2'-O-methyl modified nucleotide
  modified_base 31: mod_base = OTHER; note = 2'-fluoro modified nucleotide with phosphorothioate linkage
  modified_base 32: mod_base = OTHER; note = 2'-O-methyl modified nucleotide with phosphorothioate linkage
  modified_base 33: mod_base = OTHER; note = 2'-fluoro trivalent N-acetylgalactosamine modified nucleotide
nattatagtgagttattttaactcactataata

SEQ ID NO: 1973 - RNA, 33 nt, synthetic construct
  source 1..33: mol_type = other RNA
  misc_difference 1: note = 2'-O-methyl modified nucleotide with phosphorothioate linkage may be 5' phosphate modified
  modified_base 2: mod_base = OTHER; note = 2'-fluoro modified nucleotide with phosphorothioate linkage
  modified_base 3: mod_base = OTHER; note = 2'-O-methyl modified nucleotide
  modified_base 4: mod_base = OTHER; note = 2'-fluoro modified nucleotide
  modified_base 5: mod_base = OTHER; note = 2'-O-methyl modified nucleotide
  modified_base 6: mod_base = OTHER; note = 2'-fluoro modified nucleotide
  modified_base 7: mod_base = OTHER; note = 2'-O-methyl modified nucleotide
  modified_base 8: mod_base = OTHER; note = 2'-fluoro modified nucleotide
  modified_base 9: mod_base = OTHER; note = 2'-O-methyl modified nucleotide
  modified_base 10: mod_base = OTHER; note = 2'-fluoro modified nucleotide
  modified_base 11: mod_base = OTHER; note = 2'-O-methyl modified nucleotide
  modified_base 12: mod_base = OTHER; note = 2'-fluoro modified nucleotide
  modified_base 13: mod_base = OTHER; note = 2'-O-methyl modified nucleotide
  modified_base 14: mod_base = OTHER; note = 2'-fluoro modified nucleotide with phosphorothioate linkage
  modified_base 15: mod_base = OTHER; note = 2'-O-methyl modified nucleotide with phosphorothioate linkage
  modified_base 16: mod_base = OTHER; note = 2'-fluoro modified nucleotide with phosphorothioate linkage
  modified_base 17: mod_base = OTHER; note = 2'-O-methyl modified nucleotide with phosphorothioate linkage
  modified_base 18: mod_base = OTHER; note = 2'-fluoro modified nucleotide with phosphorothioate linkage
  modified_base 19: mod_base = OTHER; note = 2'-O-methyl modified nucleotide with phosphorothioate linkage
  modified_base 20: mod_base = OTHER; note = 2'-O-methyl modified nucleotide
  modified_base 21: mod_base = OTHER; note = 2'-fluoro modified nucleotide
  modified_base 22: mod_base = OTHER; note = 2'-O-methyl modified nucleotide
  modified_base 23: mod_base = OTHER; note = 2'-fluoro modified nucleotide
  modified_base 24: mod_base = OTHER; note = 2'-O-methyl modified nucleotide
  modified_base 25: mod_base = OTHER; note = 2'-fluoro modified nucleotide
  modified_base 26: mod_base = OTHER; note = 2'-O-methyl modified nucleotide
  modified_base 27: mod_base = OTHER; note = 2'-fluoro modified nucleotide
  modified_base 28: mod_base = OTHER; note = 2'-O-methyl modified nucleotide
  modified_base 29: mod_base = OTHER; note = 2'-fluoro modified nucleotide
  modified_base 30: mod_base = OTHER; note = 2'-O-methyl modified nucleotide
  modified_base 31: mod_base = OTHER; note = 2'-fluoro modified nucleotide with phosphorothioate linkage
  modified_base 32: mod_base = OTHER; note = 2'-O-methyl modified nucleotide with phosphorothioate linkage
  modified_base 33: mod_base = OTHER; note = 2'-fluoro trivalent N-acetylgalactosamine modified nucleotide
nccaagtcagatgtctcttacatctgacttgga

SEQ ID NO: 1974 - RNA, 33 nt, synthetic construct
  source 1..33: mol_type = other RNA
  misc_difference 1: note = 2'-O-methyl modified nucleotide with phosphorothioate linkage may be 5' phosphate modified
  modified_base 2: mod_base = OTHER; note = 2'-fluoro modified nucleotide with phosphorothioate linkage
  modified_base 3: mod_base = OTHER; note = 2'-O-methyl modified nucleotide
  modified_base 4: mod_base = OTHER; note = 2'-fluoro modified nucleotide
  modified_base 5: mod_base = OTHER; note = 2'-O-methyl modified nucleotide
  modified_base 6: mod_base = OTHER; note = 2'-fluoro modified nucleotide
  modified_base 7: mod_base = OTHER; note = 2'-O-methyl modified nucleotide
  modified_base 8: mod_base = OTHER; note = 2'-fluoro modified nucleotide
  modified_base 9: mod_base = OTHER; note = 2'-O-methyl modified nucleotide
  modified_base 10: mod_base = OTHER; note = 2'-fluoro modified nucleotide
  modified_base 11: mod_base = OTHER; note = 2'-O-methyl modified nucleotide
  modified_base 12: mod_base = OTHER; note = 2'-fluoro modified nucleotide
  modified_base 13: mod_base = OTHER; note = 2'-O-methyl modified nucleotide
  modified_base 14: mod_base = OTHER; note = 2'-fluoro modified nucleotide with phosphorothioate linkage
  modified_base 15: mod_base = OTHER; note = 2'-O-methyl modified nucleotide with phosphorothioate linkage
  modified_base 16: mod_base = OTHER; note = 2'-fluoro modified nucleotide with phosphorothioate linkage
  modified_base 17: mod_base = OTHER; note = 2'-O-methyl modified nucleotide with phosphorothioate linkage
  modified_base 18: mod_base = OTHER; note = 2'-fluoro modified nucleotide with phosphorothioate linkage
  modified_base 19: mod_base = OTHER; note = 2'-O-methyl modified nucleotide with phosphorothioate linkage
  modified_base 20: mod_base = OTHER; note = 2'-O-methyl modified nucleotide
  modified_base 21: mod_base = OTHER; note = 2'-fluoro modified nucleotide
  modified_base 22: mod_base = OTHER; note = 2'-O-methyl modified nucleotide
  modified_base 23: mod_base = OTHER; note = 2'-fluoro modified nucleotide
  modified_base 24: mod_base = OTHER; note = 2'-O-methyl modified nucleotide
  modified_base 25: mod_base = OTHER; note = 2'-fluoro modified nucleotide
  modified_base 26: mod_base = OTHER; note = 2'-O-methyl modified nucleotide
  modified_base 27: mod_base = OTHER; note = 2'-fluoro modified nucleotide
  modified_base 28: mod_base = OTHER; note = 2'-O-methyl modified nucleotide
  modified_base 29: mod_base = OTHER; note = 2'-fluoro modified nucleotide
  modified_base 30: mod_base = OTHER; note = 2'-O-methyl modified nucleotide
  modified_base 31: mod_base = OTHER; note = 2'-fluoro modified nucleotide with phosphorothioate linkage
  modified_base 32: mod_base = OTHER; note = 2'-O-methyl modified nucleotide with phosphorothioate linkage
  modified_base 33: mod_base = OTHER; note = 2'-fluoro trivalent N-acetylgalactosamine modified nucleotide
ncaggaaaagagataattcatctcttttcctga

SEQ ID NO: 1975 - RNA, 33 nt, synthetic construct
  source 1..33: mol_type = other RNA
  misc_difference 1: note = 2'-O-methyl modified nucleotide with phosphorothioate linkage may be 5' phosphate modified
  modified_base 2: mod_base = OTHER; note = 2'-fluoro modified nucleotide with phosphorothioate linkage
  modified_base 3: mod_base = OTHER; note = 2'-O-methyl modified nucleotide
  modified_base 4: mod_base = OTHER; note = 2'-fluoro modified nucleotide
  modified_base 5: mod_base = OTHER; note = 2'-O-methyl modified nucleotide
  modified_base 6: mod_base = OTHER; note = 2'-fluoro modified nucleotide
  modified_base 7: mod_base = OTHER; note = 2'-O-methyl modified nucleotide
  modified_base 8: mod_base = OTHER; note = 2'-fluoro modified nucleotide
  modified_base 9: mod_base = OTHER; note = 2'-O-methyl modified nucleotide
  modified_base 10: mod_base = OTHER; note = 2'-fluoro modified nucleotide
  modified_base 11: mod_base = OTHER; note = 2'-O-methyl modified nucleotide
  modified_base 12: mod_base = OTHER; note = 2'-fluoro modified nucleotide
  modified_base 13: mod_base = OTHER; note = 2'-O-methyl modified nucleotide
  modified_base 14: mod_base = OTHER; note = 2'-fluoro modified nucleotide with phosphorothioate linkage
  modified_base 15: mod_base = OTHER; note = 2'-O-methyl modified nucleotide with phosphorothioate linkage
  modified_base 16: mod_base = OTHER; note = 2'-fluoro modified nucleotide with phosphorothioate linkage
  modified_base 17: mod_base = OTHER; note = 2'-O-methyl modified nucleotide with phosphorothioate linkage
  modified_base 18: mod_base = OTHER; note = 2'-fluoro modified nucleotide with phosphorothioate linkage
  modified_base 19: mod_base = OTHER; note = 2'-O-methyl modified nucleotide with phosphorothioate linkage
  modified_base 20: mod_base = OTHER; note = 2'-O-methyl modified nucleotide
  modified_base 21: mod_base = OTHER; note = 2'-fluoro modified nucleotide
  modified_base 22: mod_base = OTHER; note = 2'-O-methyl modified nucleotide
  modified_base 23: mod_base = OTHER; note = 2'-fluoro modified nucleotide
  modified_base 24: mod_base = OTHER; note = 2'-O-methyl modified nucleotide
  modified_base 25: mod_base = OTHER; note = 2'-fluoro modified nucleotide
  modified_base 26: mod_base = OTHER; note = 2'-O-methyl modified nucleotide
  modified_base 27: mod_base = OTHER; note = 2'-fluoro modified nucleotide
  modified_base 28: mod_base = OTHER; note = 2'-O-methyl modified nucleotide
  modified_base 29: mod_base = OTHER; note = 2'-fluoro modified nucleotide
  modified_base 30: mod_base = OTHER; note = 2'-O-methyl modified nucleotide
  modified_base 31: mod_base = OTHER; note = 2'-fluoro modified nucleotide with phosphorothioate linkage
  modified_base 32: mod_base = OTHER; note = 2'-O-methyl modified nucleotide with phosphorothioate linkage
  modified_base 33: mod_base = OTHER; note = 2'-fluoro trivalent N-acetylgalactosamine modified nucleotide
ngcaagacatattctttaagaatatgtcttgca

SEQ ID NO: 1976 - RNA, 33 nt, synthetic construct
  source 1..33: mol_type = other RNA
  misc_difference 1: note = 2'-O-methyl modified nucleotide with phosphorothioate linkage may be 5' phosphate modified
  modified_base 2: mod_base = OTHER; note = 2'-fluoro modified nucleotide with phosphorothioate linkage
  modified_base 3: mod_base = OTHER; note = 2'-O-methyl modified nucleotide
  modified_base 4: mod_base = OTHER; note = 2'-fluoro modified nucleotide
  modified_base 5: mod_base = OTHER; note = 2'-O-methyl modified nucleotide
  modified_base 6: mod_base = OTHER; note = 2'-fluoro modified nucleotide
  modified_base 7: mod_base = OTHER; note = 2'-O-methyl modified nucleotide
  modified_base 8: mod_base = OTHER; note = 2'-fluoro modified nucleotide
  modified_base 9: mod_base = OTHER; note = 2'-O-methyl modified nucleotide
  modified_base 10: mod_base = OTHER; note = 2'-fluoro modified nucleotide
  modified_base 11: mod_base = OTHER; note = 2'-O-methyl modified nucleotide
  modified_base 12: mod_base = OTHER; note = 2'-fluoro modified nucleotide
  modified_base 13: mod_base = OTHER; note = 2'-O-methyl modified nucleotide
  modified_base 14: mod_base = OTHER; note = 2'-fluoro modified nucleotide with phosphorothioate linkage
  modified_base 15: mod_base = OTHER; note = 2'-O-methyl modified nucleotide with phosphorothioate linkage
  modified_base 16: mod_base = OTHER; note = 2'-fluoro modified nucleotide with phosphorothioate linkage
  modified_base 17: mod_base = OTHER; note = 2'-O-methyl modified nucleotide with phosphorothioate linkage
  modified_base 18: mod_base = OTHER; note = 2'-fluoro modified nucleotide with phosphorothioate linkage
  modified_base 19: mod_base = OTHER; note = 2'-O-methyl modified nucleotide with phosphorothioate linkage
  modified_base 20: mod_base = OTHER; note = 2'-O-methyl modified nucleotide
  modified_base 21: mod_base = OTHER; note = 2'-fluoro modified nucleotide
  modified_base 22: mod_base = OTHER; note = 2'-O-methyl modified nucleotide
  modified_base 23: mod_base = OTHER; note = 2'-fluoro modified nucleotide
  modified_base 24: mod_base = OTHER; note = 2'-O-methyl modified nucleotide
  modified_base 25: mod_base = OTHER; note = 2'-fluoro modified nucleotide
  modified_base 26: mod_base = OTHER; note = 2'-O-methyl modified nucleotide
  modified_base 27: mod_base = OTHER; note = 2'-fluoro modified nucleotide
  modified_base 28: mod_base = OTHER; note = 2'-O-methyl modified nucleotide
  modified_base 29: mod_base = OTHER; note = 2'-fluoro modified nucleotide
  modified_base 30: mod_base = OTHER; note = 2'-O-methyl modified nucleotide
  modified_base 31: mod_base = OTHER; note = 2'-fluoro modified nucleotide with phosphorothioate linkage
  modified_base 32: mod_base = OTHER; note = 2'-O-methyl modified nucleotide with phosphorothioate linkage
  modified_base 33: mod_base = OTHER; note = 2'-fluoro trivalent N-acetylgalactosamine modified nucleotide
naaggccaatttccagaggggaaattggcctta

SEQ ID NO: 1977 - RNA, 33 nt, synthetic construct
  source 1..33: mol_type = other RNA
  misc_difference 1: note = 2'-O-methyl modified nucleotide with phosphorothioate linkage may be 5' phosphate modified
  modified_base 2: mod_base = OTHER; note = 2'-fluoro modified nucleotide with phosphorothioate linkage
  modified_base 3: mod_base = OTHER; note = 2'-O-methyl modified nucleotide
  modified_base 4: mod_base = OTHER; note = 2'-fluoro modified nucleotide
  modified_base 5: mod_base = OTHER; note = 2'-O-methyl modified nucleotide
  modified_base 6: mod_base = OTHER; note = 2'-fluoro modified nucleotide
  modified_base 7: mod_base = OTHER; note = 2'-O-methyl modified nucleotide
  modified_base 8: mod_base = OTHER; note = 2'-fluoro modified nucleotide
  modified_base 9: mod_base = OTHER; note = 2'-O-methyl modified nucleotide
  modified_base 10: mod_base = OTHER; note = 2'-fluoro modified nucleotide
  modified_base 11: mod_base = OTHER; note = 2'-O-methyl modified nucleotide
  modified_base 12: mod_base = OTHER; note = 2'-fluoro modified nucleotide
  modified_base 13: mod_base = OTHER; note = 2'-O-methyl modified nucleotide
  modified_base 14: mod_base = OTHER; note = 2'-fluoro modified nucleotide with phosphorothioate linkage
  modified_base 15: mod_base = OTHER; note = 2'-O-methyl modified nucleotide with phosphorothioate linkage
  modified_base 16: mod_base = OTHER; note = 2'-fluoro modified nucleotide with phosphorothioate linkage
  modified_base 17: mod_base = OTHER; note = 2'-O-methyl modified nucleotide with phosphorothioate linkage
  modified_base 18: mod_base = OTHER; note = 2'-fluoro modified nucleotide with phosphorothioate linkage
  modified_base 19: mod_base = OTHER; note = 2'-O-methyl modified nucleotide with phosphorothioate linkage
  modified_base 20: mod_base = OTHER; note = 2'-O-methyl modified nucleotide
  modified_base 21: mod_base = OTHER; note = 2'-fluoro modified nucleotide
  modified_base 22: mod_base = OTHER; note = 2'-O-methyl modified nucleotide
  modified_base 23: mod_base = OTHER; note = 2'-fluoro modified nucleotide
  modified_base 24: mod_base = OTHER; note = 2'-O-methyl modified nucleotide
  modified_base 25: mod_base = OTHER; note = 2'-fluoro modified nucleotide
  modified_base 26: mod_base = OTHER; note = 2'-O-methyl modified nucleotide
  modified_base 27: mod_base = OTHER; note = 2'-fluoro modified nucleotide
  modified_base 28: mod_base = OTHER; note = 2'-O-methyl modified nucleotide
  modified_base 29: mod_base = OTHER; note = 2'-fluoro modified nucleotide
  modified_base 30: mod_base = OTHER; note = 2'-O-methyl modified nucleotide
  modified_base 31: mod_base = OTHER; note = 2'-fluoro modified nucleotide with phosphorothioate linkage
  modified_base 32: mod_base = OTHER; note = 2'-O-methyl modified nucleotide with phosphorothioate linkage
  modified_base 33: mod_base = OTHER; note = 2'-fluoro trivalent N-acetylgalactosamine modified nucleotide
naagtaattatagtgagttactataattactta

SEQ ID NO: 1978 - RNA, 33 nt, synthetic construct
  source 1..33: mol_type = other RNA
  misc_difference 1: note = 2'-O-methyl modified nucleotide with phosphorothioate linkage may be 5' phosphate modified
  modified_base 2: mod_base = OTHER; note = 2'-fluoro modified nucleotide with phosphorothioate linkage
  modified_base 3: mod_base = OTHER; note = 2'-O-methyl modified nucleotide
  modified_base 4: mod_base = OTHER; note = 2'-fluoro modified nucleotide
  modified_base 5: mod_base = OTHER; note = 2'-O-methyl modified nucleotide
  modified_base 6: mod_base = OTHER; note = 2'-fluoro modified nucleotide
  modified_base 7: mod_base = OTHER; note = 2'-O-methyl modified nucleotide
  modified_base 8: mod_base = OTHER; note = 2'-fluoro modified nucleotide
  modified_base 9: mod_base = OTHER; note = 2'-O-methyl modified nucleotide
  modified_base 10: mod_base = OTHER; note = 2'-fluoro modified nucleotide
  modified_base 11: mod_base = OTHER; note = 2'-O-methyl modified nucleotide
  modified_base 12: mod_base = OTHER; note = 2'-fluoro modified nucleotide
  modified_base 13: mod_base = OTHER; note = 2'-O-methyl modified nucleotide
  modified_base 14: mod_base = OTHER; note = 2'-fluoro modified nucleotide with phosphorothioate linkage
  modified_base 15: mod_base = OTHER; note = 2'-O-methyl modified nucleotide with phosphorothioate linkage
  modified_base 16: mod_base = OTHER; note = 2'-fluoro modified nucleotide with phosphorothioate linkage
  modified_base 17: mod_base = OTHER; note = 2'-O-methyl modified nucleotide with phosphorothioate linkage
  modified_base 18: mod_base = OTHER; note = 2'-fluoro modified nucleotide with phosphorothioate linkage
  modified_base 19: mod_base = OTHER; note = 2'-O-methyl modified nucleotide with phosphorothioate linkage
  modified_base 20: mod_base = OTHER; note = 2'-O-methyl modified nucleotide
  modified_base 21: mod_base = OTHER; note = 2'-fluoro modified nucleotide
  modified_base 22: mod_base = OTHER; note = 2'-O-methyl modified nucleotide
  modified_base 23: mod_base = OTHER; note = 2'-fluoro modified nucleotide
  modified_base 24: mod_base = OTHER; note = 2'-O-methyl modified nucleotide
  modified_base 25: mod_base = OTHER; note = 2'-fluoro modified nucleotide
  modified_base 26: mod_base = OTHER; note = 2'-O-methyl modified nucleotide
  modified_base 27: mod_base = OTHER; note = 2'-fluoro modified nucleotide
  modified_base 28: mod_base = OTHER; note = 2'-O-methyl modified nucleotide
  modified_base 29: mod_base = OTHER; note = 2'-fluoro modified nucleotide
  modified_base 30: mod_base = OTHER; note = 2'-O-methyl modified nucleotide
  modified_base 31: mod_base = OTHER; note = 2'-fluoro modified nucleotide with phosphorothioate linkage
  modified_base 32: mod_base = OTHER; note = 2'-O-methyl modified nucleotide with phosphorothioate linkage
  modified_base 33: mod_base = OTHER; note = 2'-fluoro trivalent N-acetylgalactosamine modified nucleotide
ntaaaatcaagtaattatattacttgattttaa

SEQ ID NO: 1979 - RNA, 33 nt, synthetic construct
  source 1..33: mol_type = other RNA
  misc_difference 1: note = 2'-O-methyl modified nucleotide with phosphorothioate linkage may be 5' phosphate modified
  modified_base 2: mod_base = OTHER; note = 2'-fluoro modified nucleotide with phosphorothioate linkage
  modified_base 3: mod_base = OTHER; note = 2'-O-methyl modified nucleotide
  modified_base 4: mod_base = OTHER; note = 2'-fluoro modified nucleotide
  modified_base 5: mod_base = OTHER; note = 2'-O-methyl modified nucleotide
  modified_base 6: mod_base = OTHER; note = 2'-fluoro modified nucleotide
  modified_base 7: mod_base = OTHER; note = 2'-O-methyl modified nucleotide
  modified_base 8: mod_base = OTHER; note = 2'-fluoro modified nucleotide
  modified_base 9: mod_base = OTHER; note = 2'-O-methyl modified nucleotide
  modified_base 10: mod_base = OTHER; note = 2'-fluoro modified nucleotide
  modified_base 11: mod_base = OTHER; note = 2'-O-methyl modified nucleotide
  modified_base 12: mod_base = OTHER; note = 2'-fluoro modified nucleotide
  modified_base 13: mod_base = OTHER; note = 2'-O-methyl modified nucleotide
  modified_base 14: mod_base = OTHER; note = 2'-fluoro modified nucleotide with phosphorothioate linkage
  modified_base 15: mod_base = OTHER; note = 2'-O-methyl modified nucleotide with phosphorothioate linkage
  modified_base 16: mod_base = OTHER; note = 2'-fluoro modified nucleotide with phosphorothioate linkage
  modified_base 17: mod_base = OTHER; note = 2'-O-methyl modified nucleotide with phosphorothioate linkage
  modified_base 18: mod_base = OTHER; note = 2'-fluoro modified nucleotide with phosphorothioate linkage
  modified_base 19: mod_base = OTHER; note = 2'-O-methyl modified nucleotide with phosphorothioate linkage
  modified_base 20: mod_base = OTHER; note = 2'-O-methyl modified nucleotide
  modified_base 21: mod_base = OTHER; note = 2'-fluoro modified nucleotide
  modified_base 22: mod_base = OTHER; note = 2'-O-methyl modified nucleotide
  modified_base 23: mod_base = OTHER; note = 2'-fluoro modified nucleotide
  modified_base 24: mod_base = OTHER; note = 2'-O-methyl modified nucleotide
  modified_base 25: mod_base = OTHER; note = 2'-fluoro modified nucleotide
  modified_base 26: mod_base = OTHER; note = 2'-O-methyl modified nucleotide
  modified_base 27: mod_base = OTHER; note = 2'-fluoro modified nucleotide
  modified_base 28: mod_base = OTHER; note = 2'-O-methyl modified nucleotide
  modified_base 29: mod_base = OTHER; note = 2'-fluoro modified nucleotide
  modified_base 30: mod_base = OTHER; note = 2'-O-methyl modified nucleotide
  modified_base 31: mod_base = OTHER; note = 2'-fluoro modified nucleotide with phosphorothioate linkage
  modified_base 32: mod_base = OTHER; note = 2'-O-methyl modified nucleotide with phosphorothioate linkage
  modified_base 33: mod_base = OTHER; note = 2'-fluoro trivalent N-acetylgalactosamine modified nucleotide
ntcaagtaattatagtgagtataattacttgaa

SEQ ID NO: 1980 - RNA, 33 nt, synthetic construct
  source 1..33: mol_type = other RNA
  misc_difference 1: note = 2'-O-methyl modified nucleotide with phosphorothioate linkage may be 5' phosphate modified
  modified_base 2: mod_base = OTHER; note = 2'-fluoro modified nucleotide with phosphorothioate linkage
  modified_base 3: mod_base = OTHER; note = 2'-O-methyl modified nucleotide
  modified_base 4: mod_base = OTHER; note = 2'-fluoro modified nucleotide
  modified_base 5: mod_base = OTHER; note = 2'-O-methyl modified nucleotide
  modified_base 6: mod_base = OTHER; note = 2'-fluoro modified nucleotide
  modified_base 7: mod_base = OTHER; note = 2'-O-methyl modified nucleotide
  modified_base 8: mod_base = OTHER; note = 2'-fluoro modified nucleotide
  modified_base 9: mod_base = OTHER; note = 2'-O-methyl modified nucleotide
  modified_base 10: mod_base = OTHER; note = 2'-fluoro modified nucleotide
  modified_base 11: mod_base = OTHER; note = 2'-O-methyl modified nucleotide
  modified_base 12: mod_base = OTHER; note = 2'-fluoro modified nucleotide
  modified_base 13: mod_base = OTHER; note = 2'-O-methyl modified nucleotide
  modified_base 14: mod_base = OTHER; note = 2'-fluoro modified nucleotide with phosphorothioate linkage
  modified_base 15: mod_base = OTHER; note = 2'-O-methyl modified nucleotide with phosphorothioate linkage
  modified_base 16: mod_base = OTHER; note = 2'-fluoro modified nucleotide with phosphorothioate linkage
  modified_base 17: mod_base = OTHER; note = 2'-O-methyl modified nucleotide with phosphorothioate linkage
  modified_base 18: mod_base = OTHER; note = 2'-fluoro modified nucleotide with phosphorothioate linkage
  modified_base 19: mod_base = OTHER; note = 2'-O-methyl modified nucleotide with phosphorothioate linkage
  modified_base 20: mod_base = OTHER; note = 2'-O-methyl modified nucleotide
  modified_base 21: mod_base = OTHER; note = 2'-fluoro modified nucleotide
  modified_base 22: mod_base = OTHER; note = 2'-O-methyl modified nucleotide
  modified_base 23: mod_base = OTHER; note = 2'-fluoro modified nucleotide
  modified_base 24: mod_base = OTHER; note = 2'-O-methyl modified nucleotide
  modified_base 25: mod_base = OTHER; note = 2'-fluoro modified nucleotide
  modified_base 26: mod_base = OTHER; note = 2'-O-methyl modified nucleotide
  modified_base 27: mod_base = OTHER; note = 2'-fluoro modified nucleotide
  modified_base 28: mod_base = OTHER; note = 2'-O-methyl modified nucleotide
  modified_base 29: mod_base = OTHER; note = 2'-fluoro modified nucleotide
  modified_base 30: mod_base = OTHER; note = 2'-O-methyl modified nucleotide
  modified_base 31: mod_base = OTHER; note = 2'-fluoro modified nucleotide with phosphorothioate linkage
  modified_base 32: mod_base = OTHER; note = 2'-O-methyl modified nucleotide with phosphorothioate linkage
  modified_base 33: mod_base = OTHER; note = 2'-fluoro trivalent N-acetylgalactosamine modified nucleotide
nccaatttccagaggaagcctctggaaattgga

SEQ ID NO: 1981 - RNA, 33 nt, synthetic construct
  source 1..33: mol_type = other RNA
  misc_difference 1: note = 2'-O-methyl modified nucleotide with phosphorothioate linkage may be 5' phosphate modified
  modified_base 2: mod_base = OTHER; note = 2'-fluoro modified nucleotide with phosphorothioate linkage
  modified_base 3: mod_base = OTHER; note = 2'-O-methyl modified nucleotide
  modified_base 4: mod_base = OTHER; note = 2'-fluoro modified nucleotide
  modified_base 5: mod_base = OTHER; note = 2'-O-methyl modified nucleotide
  modified_base 6: mod_base = OTHER; note = 2'-fluoro modified nucleotide
  modified_base 7: mod_base = OTHER; note = 2'-O-methyl modified nucleotide
  modified_base 8: mod_base = OTHER; note = 2'-fluoro modified nucleotide
  modified_base 9: mod_base = OTHER; note = 2'-O-methyl modified nucleotide
  modified_base 10: mod_base = OTHER; note = 2'-fluoro modified nucleotide
  modified_base 11: mod_base = OTHER; note = 2'-O-methyl modified nucleotide
  modified_base 12: mod_base = OTHER; note = 2'-fluoro modified nucleotide
  modified_base 13: mod_base = OTHER; note = 2'-O-methyl modified nucleotide
  modified_base 14: mod_base = OTHER; note = 2'-fluoro modified nucleotide with phosphorothioate linkage
  modified_base 15: mod_base = OTHER; note = 2'-O-methyl modified nucleotide with phosphorothioate linkage
  modified_base 16: mod_base = OTHER; note = 2'-fluoro modified nucleotide with phosphorothioate linkage
  modified_base 17: mod_base = OTHER; note = 2'-O-methyl modified nucleotide with phosphorothioate linkage
  modified_base 18: mod_base = OTHER; note = 2'-fluoro modified nucleotide with phosphorothioate linkage
  modified_base 19: mod_base = OTHER; note = 2'-O-methyl modified nucleotide with phosphorothioate linkage
  modified_base 20: mod_base = OTHER; note = 2'-O-methyl modified nucleotide
  modified_base 21: mod_base = OTHER; note = 2'-fluoro modified nucleotide
  modified_base 22: mod_base = OTHER; note = 2'-O-methyl modified nucleotide
  modified_base 23: mod_base = OTHER; note = 2'-fluoro modified nucleotide
  modified_base 24: mod_base = OTHER; note = 2'-O-methyl modified nucleotide
  modified_base 25: mod_base = OTHER; note = 2'-fluoro modified nucleotide
  modified_base 26: mod_base = OTHER; note = 2'-O-methyl modified nucleotide
  modified_base 27: mod_base = OTHER; note = 2'-fluoro modified nucleotide
  modified_base 28: mod_base = OTHER; note = 2'-O-methyl modified nucleotide
  modified_base 29: mod_base = OTHER; note = 2'-fluoro modified nucleotide
  modified_base 30: mod_base = OTHER; note = 2'-O-methyl modified nucleotide
  modified_base 31: mod_base = OTHER; note = 2'-fluoro modified nucleotide with phosphorothioate linkage
  modified_base 32: mod_base = OTHER; note = 2'-O-methyl modified nucleotide with phosphorothioate linkage
  modified_base 33: mod_base = OTHER; note = 2'-fluoro trivalent N-acetylgalactosamine modified nucleotide
ngtaattatagtgagttattcactataattaca

SEQ ID NO: 1982 - RNA, 33 nt, synthetic construct
  source 1..33: mol_type = other RNA
  misc_difference 1: note = 2'-O-methyl modified nucleotide with phosphorothioate linkage may be 5' phosphate modified
  modified_base 2: mod_base = OTHER; note = 2'-fluoro modified nucleotide with phosphorothioate linkage
  modified_base 3: mod_base = OTHER; note = 2'-O-methyl modified nucleotide
  modified_base 4: mod_base = OTHER; note = 2'-fluoro modified nucleotide
  modified_base 5: mod_base = OTHER; note = 2'-O-methyl modified nucleotide
  modified_base 6: mod_base = OTHER; note = 2'-fluoro modified nucleotide
  modified_base 7: mod_base = OTHER; note = 2'-O-methyl modified nucleotide
  modified_base 8: mod_base = OTHER; note = 2'-fluoro modified nucleotide
  modified_base 9: mod_base = OTHER; note = 2'-O-methyl modified nucleotide
  modified_base 10: mod_base = OTHER; note = 2'-fluoro modified nucleotide
  modified_base 11: mod_base = OTHER; note = 2'-O-methyl modified nucleotide
  modified_base 12: mod_base = OTHER; note = 2'-fluoro modified nucleotide
  modified_base 13: mod_base = OTHER; note = 2'-O-methyl modified nucleotide
  modified_base 14: mod_base = OTHER; note = 2'-fluoro modified nucleotide with phosphorothioate linkage
  modified_base 15: mod_base = OTHER; note = 2'-O-methyl modified nucleotide with phosphorothioate linkage
  modified_base 16: mod_base = OTHER; note = 2'-fluoro modified nucleotide with phosphorothioate linkage
  modified_base 17: mod_base = OTHER; note = 2'-O-methyl modified nucleotide with phosphorothioate linkage
  modified_base 18: mod_base = OTHER; note = 2'-fluoro modified nucleotide with phosphorothioate linkage
  modified_base 19: mod_base = OTHER; note = 2'-O-methyl modified nucleotide with phosphorothioate linkage
  modified_base 20: mod_base = OTHER; note = 2'-O-methyl modified nucleotide
  modified_base 21: mod_base = OTHER; note = 2'-fluoro modified nucleotide
  modified_base 22: mod_base = OTHER; note = 2'-O-methyl modified nucleotide
  modified_base 23: mod_base = OTHER; note = 2'-fluoro modified nucleotide
  modified_base 24: mod_base = OTHER; note = 2'-O-methyl modified nucleotide
  modified_base 25: mod_base = OTHER; note = 2'-fluoro modified nucleotide
  modified_base 26: mod_base = OTHER; note = 2'-O-methyl modified nucleotide
  modified_base 27: mod_base = OTHER; note = 2'-fluoro modified nucleotide
  modified_base 28: mod_base = OTHER; note = 2'-O-methyl modified nucleotide
  modified_base 29: mod_base = OTHER; note = 2'-fluoro modified nucleotide
  modified_base 30: mod_base = OTHER; note = 2'-O-methyl modified nucleotide
  modified_base 31: mod_base = OTHER; note = 2'-fluoro modified nucleotide with phosphorothioate linkage
  modified_base 32: mod_base = OTHER; note = 2'-O-methyl modified nucleotide with phosphorothioate linkage
  modified_base 33: mod_base = OTHER; note = 2'-fluoro trivalent N-acetylgalactosamine modified nucleotide
naaaggtacttgttgtttaaacaagtaccttta

SEQ ID NO: 1983 - RNA, 33 nt, synthetic construct
  source 1..33: mol_type = other RNA
  misc_difference 1: note = 2'-O-methyl modified nucleotide with phosphorothioate linkage may be 5' phosphate modified
  modified_base 2: mod_base = OTHER; note = 2'-fluoro modified nucleotide with phosphorothioate linkage
  modified_base 3: mod_base = OTHER; note = 2'-O-methyl modified nucleotide
  modified_base 4: mod_base = OTHER; note = 2'-fluoro modified nucleotide
  modified_base 5: mod_base = OTHER; note = 2'-O-methyl modified nucleotide
  modified_base 6: mod_base = OTHER; note = 2'-fluoro modified nucleotide
  modified_base 7: mod_base = OTHER; note = 2'-O-methyl modified nucleotide
  modified_base 8: mod_base = OTHER; note = 2'-fluoro modified nucleotide
  modified_base 9: mod_base = OTHER; note = 2'-O-methyl modified nucleotide
  modified_base 10: mod_base = OTHER; note = 2'-fluoro modified nucleotide
  modified_base 11: mod_base = OTHER; note = 2'-O-methyl modified nucleotide
  modified_base 12: mod_base = OTHER; note = 2'-fluoro modified nucleotide
  modified_base 13: mod_base = OTHER; note = 2'-O-methyl modified nucleotide
  modified_base 14: mod_base = OTHER; note = 2'-fluoro modified nucleotide with phosphorothioate linkage
  modified_base 15: mod_base = OTHER; note = 2'-O-methyl modified nucleotide with phosphorothioate linkage
  modified_base 16: mod_base = OTHER; note = 2'-fluoro modified nucleotide with phosphorothioate linkage
  modified_base 17: mod_base = OTHER; note = 2'-O-methyl modified nucleotide with phosphorothioate linkage
  modified_base 18: mod_base = OTHER; note = 2'-fluoro modified nucleotide with phosphorothioate linkage
  modified_base 19: mod_base = OTHER; note = 2'-O-methyl modified nucleotide with phosphorothioate linkage
  modified_base 20: mod_base = OTHER; note = 2'-O-methyl modified nucleotide
  modified_base 21: mod_base = OTHER; note = 2'-fluoro modified nucleotide
  modified_base 22: mod_base = OTHER; note = 2'-O-methyl modified nucleotide
  modified_base 23: mod_base = OTHER; note = 2'-fluoro modified nucleotide
  modified_base 24: mod_base = OTHER; note = 2'-O-methyl modified nucleotide
  modified_base 25: mod_base = OTHER; note = 2'-fluoro modified nucleotide
  modified_base 26: mod_base = OTHER; note = 2'-O-methyl modified nucleotide
  modified_base 27: mod_base = OTHER; note = 2'-fluoro modified nucleotide
  modified_base 28: mod_base = OTHER; note = 2'-O-methyl modified nucleotide
  modified_base 29: mod_base = OTHER; note = 2'-fluoro modified nucleotide
  modified_base 30: mod_base = OTHER; note = 2'-O-methyl modified nucleotide
  modified_base 31: mod_base = OTHER; note = 2'-fluoro modified nucleotide with phosphorothioate linkage
  modified_base 32: mod_base = OTHER; note = 2'-O-methyl modified nucleotide with phosphorothioate linkage
  modified_base 33: mod_base = OTHER; note = 2'-fluoro trivalent N-acetylgalactosamine modified nucleotide
nactgctgtttcagaatcactgaaacagcagta

SEQ ID NO: 1984 - RNA, 33 nt, synthetic construct
  source 1..33: mol_type = other RNA
  misc_difference 1: note = 2'-O-methyl modified nucleotide with phosphorothioate linkage may be 5' phosphate modified
  modified_base 2: mod_base = OTHER; note = 2'-fluoro modified nucleotide with phosphorothioate linkage
  modified_base 3: mod_base = OTHER; note = 2'-O-methyl modified nucleotide
  modified_base 4: mod_base = OTHER; note = 2'-fluoro modified nucleotide
  modified_base 5: mod_base = OTHER; note = 2'-O-methyl modified nucleotide
  modified_base 6: mod_base = OTHER; note = 2'-fluoro modified nucleotide
  modified_base 7: mod_base = OTHER; note = 2'-O-methyl modified nucleotide
  modified_base 8: mod_base = OTHER; note = 2'-fluoro modified nucleotide
  modified_base 9: mod_base = OTHER; note = 2'-O-methyl modified nucleotide
  modified_base 10: mod_base = OTHER; note = 2'-fluoro modified nucleotide
  modified_base 11: mod_base = OTHER; note = 2'-O-methyl modified nucleotide
  modified_base 12: mod_base = OTHER; note = 2'-fluoro modified nucleotide
  modified_base 13: mod_base = OTHER; note = 2'-O-methyl modified nucleotide
  modified_base 14: mod_base = OTHER; note = 2'-fluoro modified nucleotide with phosphorothioate linkage
  modified_base 15: mod_base = OTHER; note = 2'-O-methyl modified nucleotide with phosphorothioate linkage
  modified_base 16: mod_base = OTHER; note = 2'-fluoro modified nucleotide with phosphorothioate linkage
  modified_base 17: mod_base = OTHER; note = 2'-O-methyl modified nucleotide with phosphorothioate linkage
  modified_base 18: mod_base = OTHER; note = 2'-fluoro modified nucleotide with phosphorothioate linkage
  modified_base 19: mod_base = OTHER; note = 2'-O-methyl modified nucleotide with phosphorothioate linkage
  modified_base 20: mod_base = OTHER; note = 2'-O-methyl modified nucleotide
  modified_base 21: mod_base = OTHER; note = 2'-fluoro modified nucleotide
  modified_base 22: mod_base = OTHER; note = 2'-O-methyl modified nucleotide
  modified_base 23: mod_base = OTHER; note = 2'-fluoro modified nucleotide
  modified_base 24: mod_base = OTHER; note = 2'-O-methyl modified nucleotide
  modified_base 25: mod_base = OTHER; note = 2'-fluoro modified nucleotide
  modified_base 26: mod_base = OTHER; note = 2'-O-methyl modified nucleotide
  modified_base 27: mod_base = OTHER; note = 2'-fluoro modified nucleotide
  modified_base 28: mod_base = OTHER; note = 2'-O-methyl modified nucleotide
  modified_base 29: mod_base = OTHER; note = 2'-fluoro modified nucleotide
  modified_base 30: mod_base = OTHER; note = 2'-O-methyl modified nucleotide
  modified_base 31: mod_base = OTHER; note = 2'-fluoro modified nucleotide with phosphorothioate linkage
  modified_base 32: mod_base = OTHER; note = 2'-O-methyl modified nucleotide with phosphorothioate linkage
  modified_base 33: mod_base = OTHER; note = 2'-fluoro trivalent N-acetylgalactosamine modified nucleotide
nctgctgtttcagaatcaatctgaaacagcaga

SEQ ID NO: 1985 - RNA, 33 nt, synthetic construct
  source 1..33: mol_type = other RNA
  misc_difference 1: note = 2'-O-methyl modified nucleotide with phosphorothioate linkage may be 5' phosphate modified
  modified_base 2: mod_base = OTHER; note = 2'-fluoro modified nucleotide with phosphorothioate linkage
  modified_base 3: mod_base = OTHER; note = 2'-O-methyl modified nucleotide
  modified_base 4: mod_base = OTHER; note = 2'-fluoro modified nucleotide
  modified_base 5: mod_base = OTHER; note = 2'-O-methyl modified nucleotide
  modified_base 6: mod_base = OTHER; note = 2'-fluoro modified nucleotide
  modified_base 7: mod_base = OTHER; note = 2'-O-methyl modified nucleotide
  modified_base 8: mod_base = OTHER; note = 2'-fluoro modified nucleotide
  modified_base 9: mod_base = OTHER; note = 2'-O-methyl modified nucleotide
  modified_base 10: mod_base = OTHER; note = 2'-fluoro modified nucleotide
  modified_base 11: mod_base = OTHER; note = 2'-O-methyl modified nucleotide
  modified_base 12: mod_base = OTHER; note = 2'-fluoro modified nucleotide
  modified_base 13: mod_base = OTHER; note = 2'-O-methyl modified nucleotide
  modified_base 14: mod_base = OTHER; note = 2'-fluoro modified nucleotide with phosphorothioate linkage
  modified_base 15: mod_base = OTHER; note = 2'-O-methyl modified nucleotide with phosphorothioate linkage
  modified_base 16: mod_base = OTHER; note = 2'-fluoro modified nucleotide with phosphorothioate linkage
  modified_base 17: mod_base = OTHER; note = 2'-O-methyl modified nucleotide with phosphorothioate linkage
  modified_base 18: mod_base = OTHER; note = 2'-fluoro modified nucleotide with phosphorothioate linkage
  modified_base 19: mod_base = OTHER; note = 2'-O-methyl modified nucleotide with phosphorothioate linkage
  modified_base 20: mod_base = OTHER; note = 2'-O-methyl modified nucleotide
  modified_base 21: mod_base = OTHER; note = 2'-fluoro modified nucleotide
  modified_base 22: mod_base = OTHER; note = 2'-O-methyl modified nucleotide
  modified_base 23: mod_base = OTHER; note = 2'-fluoro modified nucleotide
  modified_base 24: mod_base = OTHER; note = 2'-O-methyl modified nucleotide
  modified_base 25: mod_base = OTHER; note = 2'-fluoro modified nucleotide
  modified_base 26: mod_base = OTHER; note = 2'-O-methyl modified nucleotide
  modified_base 27: mod_base = OTHER; note = 2'-fluoro modified nucleotide
  modified_base 28: mod_base = OTHER; note = 2'-O-methyl modified nucleotide
  modified_base 29: mod_base = OTHER; note = 2'-fluoro modified nucleotide
  modified_base 30: mod_base = OTHER; note = 2'-O-methyl modified nucleotide
  modified_base 31: mod_base = OTHER; note = 2'-fluoro modified nucleotide with phosphorothioate linkage
  modified_base 32: mod_base = OTHER; note = 2'-O-methyl modified nucleotide with phosphorothioate linkage
  modified_base 33: mod_base = OTHER; note = 2'-fluoro trivalent N-acetylgalactosamine modified nucleotide
ntataaaggtacttgttgtaagtacctttataa

SEQ ID NO: 1986 - RNA, 33 nt, synthetic construct
  source 1..33: mol_type = other RNA
  misc_difference 1: note = 2'-O-methyl modified nucleotide with phosphorothioate linkage may be 5' phosphate modified
  modified_base 2: mod_base = OTHER; note = 2'-fluoro modified nucleotide with phosphorothioate linkage
  modified_base 3: mod_base = OTHER; note = 2'-O-methyl modified nucleotide
  modified_base 4: mod_base = OTHER; note = 2'-fluoro modified nucleotide
  modified_base 5: mod_base = OTHER; note = 2'-O-methyl modified nucleotide
  modified_base 6: mod_base = OTHER; note = 2'-fluoro modified nucleotide
  modified_base 7: mod_base = OTHER; note = 2'-O-methyl modified nucleotide
  modified_base 8: mod_base = OTHER; note = 2'-fluoro modified nucleotide
  modified_base 9: mod_base = OTHER; note = 2'-O-methyl modified nucleotide
  modified_base 10: mod_base = OTHER; note = 2'-fluoro modified nucleotide
  modified_base 11: mod_base = OTHER; note = 2'-O-methyl modified nucleotide
  modified_base 12: mod_base = OTHER; note = 2'-fluoro modified nucleotide
  modified_base 13: mod_base = OTHER; note = 2'-O-methyl modified nucleotide
  modified_base 14: mod_base = OTHER; note = 2'-fluoro modified nucleotide with phosphorothioate linkage
  modified_base 15: mod_base = OTHER; note = 2'-O-methyl modified nucleotide with phosphorothioate linkage
  modified_base 16: mod_base = OTHER; note = 2'-fluoro modified nucleotide with phosphorothioate linkage
  modified_base 17: mod_base = OTHER; note = 2'-O-methyl modified nucleotide with phosphorothioate linkage
  modified_base 18: mod_base = OTHER; note = 2'-fluoro modified nucleotide with phosphorothioate linkage
  modified_base 19: mod_base = OTHER; note = 2'-O-methyl modified nucleotide with phosphorothioate linkage
  modified_base 20: mod_base = OTHER; note = 2'-O-methyl modified nucleotide
  modified_base 21: mod_base = OTHER; note = 2'-fluoro modified nucleotide
  modified_base 22: mod_base = OTHER; note = 2'-O-methyl modified nucleotide
  modified_base 23: mod_base = OTHER; note = 2'-fluoro modified nucleotide
  modified_base 24: mod_base = OTHER; note = 2'-O-methyl modified nucleotide
  modified_base 25: mod_base = OTHER; note = 2'-fluoro modified nucleotide
  modified_base 26: mod_base = OTHER; note = 2'-O-methyl modified nucleotide
  modified_base 27: mod_base = OTHER; note = 2'-fluoro modified nucleotide
  modified_base 28: mod_base = OTHER; note = 2'-O-methyl modified nucleotide
  modified_base 29: mod_base = OTHER; note = 2'-fluoro modified nucleotide
  modified_base 30: mod_base = OTHER; note = 2'-O-methyl modified nucleotide
  modified_base 31: mod_base = OTHER; note = 2'-fluoro modified nucleotide with phosphorothioate linkage
  modified_base 32: mod_base = OTHER; note = 2'-O-methyl modified nucleotide with phosphorothioate linkage
  modified_base 33: mod_base = OTHER; note = 2'-fluoro trivalent N-acetylgalactosamine modified nucleotide
ngtaaacagttcctttcaaaggaactgtttaca

SEQ ID NO: 1987 - RNA, 33 nt, synthetic construct
  source 1..33: mol_type = other RNA
  misc_difference 1: note = 2'-O-methyl modified nucleotide with phosphorothioate linkage may be 5' phosphate modified
  modified_base 2: mod_base = OTHER; note = 2'-fluoro modified nucleotide with phosphorothioate linkage
  modified_base 3: mod_base = OTHER; note = 2'-O-methyl modified nucleotide
  modified_base 4: mod_base = OTHER; note = 2'-fluoro modified nucleotide
  modified_base 5: mod_base = OTHER; note = 2'-O-methyl modified nucleotide
  modified_base 6: mod_base = OTHER; note = 2'-fluoro modified nucleotide
  modified_base 7: mod_base = OTHER; note = 2'-O-methyl modified nucleotide
  modified_base 8: mod_base = OTHER; note = 2'-fluoro modified nucleotide
  modified_base 9: mod_base = OTHER; note = 2'-O-methyl modified nucleotide
  modified_base 10: mod_base = OTHER; note = 2'-fluoro modified nucleotide
  modified_base 11: mod_base = OTHER; note = 2'-O-methyl modified nucleotide
  modified_base 12: mod_base = OTHER; note = 2'-fluoro modified nucleotide
  modified_base 13: mod_base = OTHER; note = 2'-O-methyl modified nucleotide
  modified_base 14: mod_base = OTHER; note = 2'-fluoro modified nucleotide with phosphorothioate linkage
  modified_base 15: mod_base = OTHER; note = 2'-O-methyl modified nucleotide with phosphorothioate linkage
  modified_base 16: mod_base = OTHER; note = 2'-fluoro modified nucleotide with phosphorothioate linkage
  modified_base 17: mod_base = OTHER; note = 2'-O-methyl modified nucleotide with phosphorothioate linkage
  modified_base 18: mod_base = OTHER; note = 2'-fluoro modified nucleotide with phosphorothioate linkage
  modified_base 19: mod_base = OTHER; note = 2'-O-methyl modified nucleotide with phosphorothioate linkage
  modified_base 20: mod_base = OTHER; note = 2'-O-methyl modified nucleotide
  modified_base 21: mod_base = OTHER; note = 2'-fluoro modified nucleotide
  modified_base 22: mod_base = OTHER; note = 2'-O-methyl modified nucleotide
  modified_base 23: mod_base = OTHER; note = 2'-fluoro modified nucleotide
  modified_base 24: mod_base = OTHER; note = 2'-O-methyl modified nucleotide
  modified_base 25: mod_base = OTHER; note = 2'-fluoro modified nucleotide
  modified_base 26: mod_base = OTHER; note = 2'-O-methyl modified nucleotide
  modified_base 27: mod_base = OTHER; note = 2'-fluoro modified nucleotide
  modified_base 28: mod_base = OTHER; note = 2'-O-methyl modified nucleotide
  modified_base 29: mod_base = OTHER; note = 2'-fluoro modified nucleotide
  modified_base 30: mod_base = OTHER; note = 2'-O-methyl modified nucleotide
  modified_base 31: mod_base = OTHER; note = 2'-fluoro modified nucleotide with phosphorothioate linkage
  modified_base 32: mod_base = OTHER; note = 2'-O-methyl modified nucleotide with phosphorothioate linkage
  modified_base 33: mod_base = OTHER; note = 2'-fluoro trivalent N-acetylgalactosamine modified nucleotide
ngtaactttggctgagagacagccaaagttaca

SEQ ID NO: 1988 - RNA, 33 nt, synthetic construct
  source 1..33: mol_type = other RNA
  misc_difference 1: note = 2'-O-methyl modified nucleotide with phosphorothioate linkage may be 5' phosphate modified
  modified_base 2: mod_base = OTHER; note = 2'-fluoro modified nucleotide with phosphorothioate linkage
  modified_base 3: mod_base = OTHER; note = 2'-O-methyl modified nucleotide
  modified_base 4: mod_base = OTHER; note = 2'-fluoro modified nucleotide
  modified_base 5: mod_base = OTHER; note = 2'-O-methyl modified nucleotide
  modified_base 6: mod_base = OTHER; note = 2'-fluoro modified nucleotide
  modified_base 7: mod_base = OTHER; note = 2'-O-methyl modified nucleotide
  modified_base 8: mod_base = OTHER; note = 2'-fluoro modified nucleotide
  modified_base 9: mod_base = OTHER; note = 2'-O-methyl modified nucleotide
  modified_base 10: mod_base = OTHER; note = 2'-fluoro modified nucleotide
  modified_base 11: mod_base = OTHER; note = 2'-O-methyl modified nucleotide
  modified_base 12: mod_base = OTHER; note = 2'-fluoro modified nucleotide
  modified_base 13: mod_base = OTHER; note = 2'-O-methyl modified nucleotide
  modified_base 14: mod_base = OTHER; note = 2'-fluoro modified nucleotide with phosphorothioate linkage
  modified_base 15: mod_base = OTHER; note = 2'-O-methyl modified nucleotide with phosphorothioate linkage
  modified_base 16: mod_base = OTHER; note = 2'-fluoro modified nucleotide with phosphorothioate linkage
  modified_base 17: mod_base = OTHER; note = 2'-O-methyl modified nucleotide with phosphorothioate linkage
  modified_base 18: mod_base = OTHER; note = 2'-fluoro modified nucleotide with phosphorothioate linkage
  modified_base 19: mod_base = OTHER; note = 2'-O-methyl modified nucleotide with phosphorothioate linkage
  modified_base 20: mod_base = OTHER; note = 2'-O-methyl modified nucleotide
  modified_base 21: mod_base = OTHER; note = 2'-fluoro modified nucleotide
  modified_base 22: mod_base = OTHER; note = 2'-O-methyl modified nucleotide
  modified_base 23: mod_base = OTHER; note = 2'-fluoro modified nucleotide
  modified_base 24: mod_base = OTHER; note = 2'-O-methyl modified nucleotide
  modified_base 25: mod_base = OTHER; note = 2'-fluoro modified nucleotide
  modified_base 26: mod_base = OTHER; note = 2'-O-methyl modified nucleotide
  modified_base 27: mod_base = OTHER; note = 2'-fluoro modified nucleotide
  modified_base 28: mod_base = OTHER; note = 2'-O-methyl modified nucleotide
  modified_base 29: mod_base = OTHER; note = 2'-fluoro modified nucleotide
  modified_base 30: mod_base = OTHER; note = 2'-O-methyl modified nucleotide
  modified_base 31: mod_base = OTHER; note = 2'-fluoro modified nucleotide with phosphorothioate linkage
  modified_base 32: mod_base = OTHER; note = 2'-O-methyl modified nucleotide with phosphorothioate linkage
  modified_base 33: mod_base = OTHER; note = 2'-fluoro trivalent N-acetylgalactosamine modified nucleotide
natagttgtaaacagttcctgtttacaactata

SEQ ID NO: 1989 - RNA, 33 nt, synthetic construct
  source 1..33: mol_type = other RNA
  misc_difference 1: note = 2'-O-methyl modified nucleotide with phosphorothioate linkage may be 5' phosphate modified
  modified_base 2: mod_base = OTHER; note = 2'-fluoro modified nucleotide with phosphorothioate linkage
  modified_base 3: mod_base = OTHER; note = 2'-O-methyl modified nucleotide
  modified_base 4: mod_base = OTHER; note = 2'-fluoro modified nucleotide
  modified_base 5: mod_base = OTHER; note = 2'-O-methyl modified nucleotide
  modified_base 6: mod_base = OTHER; note = 2'-fluoro modified nucleotide
  modified_base 7: mod_base = OTHER; note = 2'-O-methyl modified nucleotide
  modified_base 8: mod_base = OTHER; note = 2'-fluoro modified nucleotide
  modified_base 9: mod_base = OTHER; note = 2'-O-methyl modified nucleotide
  modified_base 10: mod_base = OTHER; note = 2'-fluoro modified nucleotide
  modified_base 11: mod_base = OTHER; note = 2'-O-methyl modified nucleotide
  modified_base 12: mod_base = OTHER; note = 2'-fluoro modified nucleotide
  modified_base 13: mod_base = OTHER; note = 2'-O-methyl modified nucleotide
  modified_base 14: mod_base = OTHER; note = 2'-fluoro modified nucleotide with phosphorothioate linkage
  modified_base 15: mod_base = OTHER; note = 2'-O-methyl modified nucleotide with phosphorothioate linkage
  modified_base 16: mod_base = OTHER; note = 2'-fluoro modified nucleotide with phosphorothioate linkage
  modified_base 17: mod_base = OTHER; note = 2'-O-methyl modified nucleotide with phosphorothioate linkage
  modified_base 18: mod_base = OTHER; note = 2'-fluoro modified nucleotide with phosphorothioate linkage
  modified_base 19: mod_base = OTHER; note = 2'-O-methyl modified nucleotide with phosphorothioate linkage
  modified_base 20: mod_base = OTHER; note = 2'-O-methyl modified nucleotide
  modified_base 21: mod_base = OTHER; note = 2'-fluoro modified nucleotide
  modified_base 22: mod_base = OTHER; note = 2'-O-methyl modified nucleotide
  modified_base 23: mod_base = OTHER; note = 2'-fluoro modified nucleotide
  modified_base 24: mod_base = OTHER; note = 2'-O-methyl modified nucleotide
  modified_base 25: mod_base = OTHER; note = 2'-fluoro modified nucleotide
  modified_base 26: mod_base = OTHER; note = 2'-O-methyl modified nucleotide
  modified_base 27: mod_base = OTHER; note = 2'-fluoro modified nucleotide
  modified_base 28: mod_base = OTHER; note = 2'-O-methyl modified nucleotide
  modified_base 29: mod_base = OTHER; note = 2'-fluoro modified nucleotide
  modified_base 30: mod_base = OTHER; note = 2'-O-methyl modified nucleotide
  modified_base 31: mod_base = OTHER; note = 2'-fluoro modified nucleotide with phosphorothioate linkage
  modified_base 32: mod_base = OTHER; note = 2'-O-methyl modified nucleotide with phosphorothioate linkage
  modified_base 33: mod_base = OTHER; note = 2'-fluoro trivalent N-acetylgalactosamine modified nucleotide
ncatattctttaacttcaagttaaagaatatga

SEQ ID NO: 1990 - RNA, 33 nt, synthetic construct
  source 1..33: mol_type = other RNA
  misc_difference 1: note = 2'-O-methyl modified nucleotide with phosphorothioate linkage may be 5' phosphate modified
  modified_base 2: mod_base = OTHER; note = 2'-fluoro modified nucleotide with phosphorothioate linkage
  modified_base 3: mod_base = OTHER; note = 2'-O-methyl modified nucleotide
  modified_base 4: mod_base = OTHER; note = 2'-fluoro modified nucleotide
  modified_base 5: mod_base = OTHER; note = 2'-O-methyl modified nucleotide
  modified_base 6: mod_base = OTHER; note = 2'-fluoro modified nucleotide
  modified_base 7: mod_base = OTHER; note = 2'-O-methyl modified nucleotide
  modified_base 8: mod_base = OTHER; note = 2'-fluoro modified nucleotide
  modified_base 9: mod_base = OTHER; note = 2'-O-methyl modified nucleotide
  modified_base 10: mod_base = OTHER; note = 2'-fluoro modified nucleotide
  modified_base 11: mod_base = OTHER; note = 2'-O-methyl modified nucleotide
  modified_base 12: mod_base = OTHER; note = 2'-fluoro modified nucleotide
  modified_base 13: mod_base = OTHER; note = 2'-O-methyl modified nucleotide
  modified_base 14: mod_base = OTHER; note = 2'-fluoro modified nucleotide with phosphorothioate linkage
  modified_base 15: mod_base = OTHER; note = 2'-O-methyl modified nucleotide with phosphorothioate linkage
  modified_base 16: mod_base = OTHER; note = 2'-fluoro modified nucleotide with phosphorothioate linkage
  modified_base 17: mod_base = OTHER; note = 2'-O-methyl modified nucleotide with phosphorothioate linkage
  modified_base 18: mod_base = OTHER; note = 2'-fluoro modified nucleotide with phosphorothioate linkage
  modified_base 19: mod_base = OTHER; note = 2'-O-methyl modified nucleotide with phosphorothioate linkage
  modified_base 20: mod_base = OTHER; note = 2'-O-methyl modified nucleotide
  modified_base 21: mod_base = OTHER; note = 2'-fluoro modified nucleotide
  modified_base 22: mod_base = OTHER; note = 2'-O-methyl modified nucleotide
  modified_base 23: mod_base = OTHER; note = 2'-fluoro modified nucleotide
  modified_base 24: mod_base = OTHER; note = 2'-O-methyl modified nucleotide
  modified_base 25: mod_base = OTHER; note = 2'-fluoro modified nucleotide
  modified_base 26: mod_base = OTHER; note = 2'-O-methyl modified nucleotide
  modified_base 27: mod_base = OTHER; note = 2'-fluoro modified nucleotide
  modified_base 28: mod_base = OTHER; note = 2'-O-methyl modified nucleotide
  modified_base 29: mod_base = OTHER; note = 2'-fluoro modified nucleotide
  modified_base 30: mod_base = OTHER; note = 2'-O-methyl modified nucleotide
  modified_base 31: mod_base = OTHER; note = 2'-fluoro modified nucleotide with phosphorothioate linkage
  modified_base 32: mod_base = OTHER; note = 2'-O-methyl modified nucleotide with phosphorothioate linkage
  modified_base 33: mod_base = OTHER; note = 2'-fluoro trivalent N-acetylgalactosamine modified nucleotide
nagcagtccttttacactctaaaaggactgcta

SEQ ID NO: 1991 - RNA, 33 nt, synthetic construct
  source 1..33: mol_type = other RNA
  misc_difference 1: note = 2'-O-methyl modified nucleotide with phosphorothioate linkage may be 5' phosphate modified
  modified_base 2: mod_base = OTHER; note = 2'-fluoro modified nucleotide with phosphorothioate linkage
  modified_base 3: mod_base = OTHER; note = 2'-O-methyl modified nucleotide
  modified_base 4: mod_base = OTHER; note = 2'-fluoro modified nucleotide
  modified_base 5: mod_base = OTHER; note = 2'-O-methyl modified nucleotide
  modified_base 6: mod_base = OTHER; note = 2'-fluoro modified nucleotide
  modified_base 7: mod_base = OTHER; note = 2'-O-methyl modified nucleotide
  modified_base 8: mod_base = OTHER; note = 2'-fluoro modified nucleotide
  modified_base 9: mod_base = OTHER; note = 2'-O-methyl modified nucleotide
  modified_base 10: mod_base = OTHER; note = 2'-fluoro modified nucleotide
  modified_base 11: mod_base = OTHER; note = 2'-O-methyl modified nucleotide
  modified_base 12: mod_base = OTHER; note = 2'-fluoro modified nucleotide
  modified_base 13: mod_base = OTHER; note = 2'-O-methyl modified nucleotide
  modified_base 14: mod_base = OTHER; note = 2'-fluoro modified nucleotide with phosphorothioate linkage
  modified_base 15: mod_base = OTHER; note = 2'-O-methyl modified nucleotide with phosphorothioate linkage
  modified_base 16: mod_base = OTHER; note = 2'-fluoro modified nucleotide with phosphorothioate linkage
  modified_base 17: mod_base = OTHER; note = 2'-O-methyl modified nucleotide with phosphorothioate linkage
  modified_base 18: mod_base = OTHER; note = 2'-fluoro modified nucleotide with phosphorothioate linkage
  modified_base 19: mod_base = OTHER; note = 2'-O-methyl modified nucleotide with phosphorothioate linkage
  modified_base 20: mod_base = OTHER; note = 2'-O-methyl modified nucleotide
  modified_base 21: mod_base = OTHER; note = 2'-fluoro modified nucleotide
  modified_base 22: mod_base = OTHER; note = 2'-O-methyl modified nucleotide
  modified_base 23: mod_base = OTHER; note = 2'-fluoro modified nucleotide
  modified_base 24: mod_base = OTHER; note = 2'-O-methyl modified nucleotide
  modified_base 25: mod_base = OTHER; note = 2'-fluoro modified nucleotide
  modified_base 26: mod_base = OTHER; note = 2'-O-methyl modified nucleotide
  modified_base 27: mod_base = OTHER; note = 2'-fluoro modified nucleotide
  modified_base 28: mod_base = OTHER; note = 2'-O-methyl modified nucleotide
  modified_base 29: mod_base = OTHER; note = 2'-fluoro modified nucleotide
  modified_base 30: mod_base = OTHER; note = 2'-O-methyl modified nucleotide
  modified_base 31: mod_base = OTHER; note = 2'-fluoro modified nucleotide with phosphorothioate linkage
  modified_base 32: mod_base = OTHER; note = 2'-O-methyl modified nucleotide with phosphorothioate linkage
  modified_base 33: mod_base = OTHER; note = 2'-fluoro trivalent N-acetylgalactosamine modified nucleotide
nagtgagttattttgtcaaaaaataactcacta

SEQ ID NO: 1992 - RNA, 33 nt, synthetic construct
  source 1..33: mol_type = other RNA
  misc_difference 1: note = 2'-O-methyl modified nucleotide with phosphorothioate linkage may be 5' phosphate modified
  modified_base 2: mod_base = OTHER; note = 2'-fluoro modified nucleotide with phosphorothioate linkage
  modified_base 3: mod_base = OTHER; note = 2'-O-methyl modified nucleotide
  modified_base 4: mod_base = OTHER; note = 2'-fluoro modified nucleotide
  modified_base 5: mod_base = OTHER; note = 2'-O-methyl modified nucleotide
  modified_base 6: mod_base = OTHER; note = 2'-fluoro modified nucleotide
  modified_base 7: mod_base = OTHER; note = 2'-O-methyl modified nucleotide
  modified_base 8: mod_base = OTHER; note = 2'-fluoro modified nucleotide
  modified_base 9: mod_base = OTHER; note = 2'-O-methyl modified nucleotide
  modified_base 10: mod_base = OTHER; note = 2'-fluoro modified nucleotide
  modified_base 11: mod_base = OTHER; note = 2'-O-methyl modified nucleotide
  modified_base 12: mod_base = OTHER; note = 2'-fluoro modified nucleotide
  modified_base 13: mod_base = OTHER; note = 2'-O-methyl modified nucleotide
  modified_base 14: mod_base = OTHER; note = 2'-fluoro modified nucleotide with phosphorothioate linkage
  modified_base 15: mod_base = OTHER; note = 2'-O-methyl modified nucleotide with phosphorothioate linkage
  modified_base 16: mod_base = OTHER; note = 2'-fluoro modified nucleotide with phosphorothioate linkage
  modified_base 17: mod_base = OTHER; note = 2'-O-methyl modified nucleotide with phosphorothioate linkage
  modified_base 18: mod_base = OTHER; note = 2'-fluoro modified nucleotide with phosphorothioate linkage
  modified_base 19: mod_base = OTHER; note = 2'-O-methyl modified nucleotide with phosphorothioate linkage
  modified_base 20: mod_base = OTHER; note = 2'-O-methyl modified nucleotide
  modified_base 21: mod_base = OTHER; note = 2'-fluoro modified nucleotide
  modified_base 22: mod_base = OTHER; note = 2'-O-methyl modified nucleotide
  modified_base 23: mod_base = OTHER; note = 2'-fluoro modified nucleotide
  modified_base 24: mod_base = OTHER; note = 2'-O-methyl modified nucleotide
  modified_base 25: mod_base = OTHER; note = 2'-fluoro modified nucleotide
  modified_base 26: mod_base = OTHER; note = 2'-O-methyl modified nucleotide
  modified_base 27: mod_base = OTHER; note = 2'-fluoro modified nucleotide
  modified_base 28: mod_base = OTHER; note = 2'-O-methyl modified nucleotide
  modified_base 29: mod_base = OTHER; note = 2'-fluoro modified nucleotide
  modified_base 30: mod_base = OTHER; note = 2'-O-methyl modified nucleotide
  modified_base 31: mod_base = OTHER; note = 2'-fluoro modified nucleotide with phosphorothioate linkage
  modified_base 32: mod_base = OTHER; note = 2'-O-methyl modified nucleotide with phosphorothioate linkage
  modified_base 33: mod_base = OTHER; note = 2'-fluoro trivalent N-acetylgalactosamine modified nucleotide
nggaagacatctttgaacaaaagatgtcttcca

SEQ ID NO: 1993 - RNA, 33 nt, synthetic construct
  source 1..33: mol_type = other RNA
  misc_difference 1: note = 2'-O-methyl modified nucleotide with phosphorothioate linkage may be 5' phosphate modified
  modified_base 2: mod_base = OTHER; note = 2'-fluoro modified nucleotide with phosphorothioate linkage
  modified_base 3: mod_base = OTHER; note = 2'-O-methyl modified nucleotide
  modified_base 4: mod_base = OTHER; note = 2'-fluoro modified nucleotide
  modified_base 5: mod_base = OTHER; note = 2'-O-methyl modified nucleotide
  modified_base 6: mod_base = OTHER; note = 2'-fluoro modified nucleotide
  modified_base 7: mod_base = OTHER; note = 2'-O-methyl modified nucleotide
  modified_base 8: mod_base = OTHER; note = 2'-fluoro modified nucleotide
  modified_base 9: mod_base = OTHER; note = 2'-O-methyl modified nucleotide
  modified_base 10: mod_base = OTHER; note = 2'-fluoro modified nucleotide
  modified_base 11: mod_base = OTHER; note = 2'-O-methyl modified nucleotide
  modified_base 12: mod_base = OTHER; note = 2'-fluoro modified nucleotide
  modified_base 13: mod_base = OTHER; note = 2'-O-methyl modified nucleotide
  modified_base 14: mod_base = OTHER; note = 2'-fluoro modified nucleotide with phosphorothioate linkage
  modified_base 15: mod_base = OTHER; note = 2'-O-methyl modified nucleotide with phosphorothioate linkage
  modified_base 16: mod_base = OTHER; note = 2'-fluoro modified nucleotide with phosphorothioate linkage
  modified_base 17: mod_base = OTHER; note = 2'-O-methyl modified nucleotide with phosphorothioate linkage
  modified_base 18: mod_base = OTHER; note = 2'-fluoro modified nucleotide with phosphorothioate linkage
  modified_base 19: mod_base = OTHER; note = 2'-O-methyl modified nucleotide with phosphorothioate linkage
  modified_base 20: mod_base = OTHER; note = 2'-O-methyl modified nucleotide
  modified_base 21: mod_base = OTHER; note = 2'-fluoro modified nucleotide
  modified_base 22: mod_base = OTHER; note = 2'-O-methyl modified nucleotide
  modified_base 23: mod_base = OTHER; note = 2'-fluoro modified nucleotide
  modified_base 24: mod_base = OTHER; note = 2'-O-methyl modified nucleotide
  modified_base 25: mod_base = OTHER; note = 2'-fluoro modified nucleotide
  modified_base 26: mod_base = OTHER; note = 2'-O-methyl modified nucleotide
  modified_base 27: mod_base = OTHER; note = 2'-fluoro modified nucleotide
  modified_base 28: mod_base = OTHER; note = 2'-O-methyl modified nucleotide
  modified_base 29: mod_base = OTHER; note = 2'-fluoro modified nucleotide
  modified_base 30: mod_base = OTHER; note = 2'-O-methyl modified nucleotide
  modified_base 31: mod_base = OTHER; note = 2'-fluoro modified nucleotide with phosphorothioate linkage
  modified_base 32: mod_base = OTHER; note = 2'-O-methyl modified nucleotide with phosphorothioate linkage
  modified_base 33: mod_base = OTHER; note = 2'-fluoro trivalent N-acetylgalactosamine modified nucleotide
ncagtccttttacactcaatgtaaaaggactga

SEQ ID NO: 1994 - RNA, 33 nt, synthetic construct
  source 1..33: mol_type = other RNA
  misc_difference 1: note = 2'-O-methyl modified nucleotide with phosphorothioate linkage may be 5' phosphate modified
  modified_base 2: mod_base = OTHER; note = 2'-fluoro modified nucleotide with phosphorothioate linkage
  modified_base 3: mod_base = OTHER; note = 2'-O-methyl modified nucleotide
  modified_base 4: mod_base = OTHER; note = 2'-fluoro modified nucleotide
  modified_base 5: mod_base = OTHER; note = 2'-O-methyl modified nucleotide
  modified_base 6: mod_base = OTHER; note = 2'-fluoro modified nucleotide
  modified_base 7: mod_base = OTHER; note = 2'-O-methyl modified nucleotide
  modified_base 8: mod_base = OTHER; note = 2'-fluoro modified nucleotide
  modified_base 9: mod_base = OTHER; note = 2'-O-methyl modified nucleotide
  modified_base 10: mod_base = OTHER; note = 2'-fluoro modified nucleotide
  modified_base 11: mod_base = OTHER; note = 2'-O-methyl modified nucleotide
  modified_base 12: mod_base = OTHER; note = 2'-fluoro modified nucleotide
  modified_base 13: mod_base = OTHER; note = 2'-O-methyl modified nucleotide
  modified_base 14: mod_base = OTHER; note = 2'-fluoro modified nucleotide with phosphorothioate linkage
  modified_base 15: mod_base = OTHER; note = 2'-O-methyl modified nucleotide with phosphorothioate linkage
  modified_base 16: mod_base = OTHER; note = 2'-fluoro modified nucleotide with phosphorothioate linkage
  modified_base 17: mod_base = OTHER; note = 2'-O-methyl modified nucleotide with phosphorothioate linkage
  modified_base 18: mod_base = OTHER; note = 2'-fluoro modified nucleotide with phosphorothioate linkage
  modified_base 19: mod_base = OTHER; note = 2'-O-methyl modified nucleotide with phosphorothioate linkage
  modified_base 20: mod_base = OTHER; note = 2'-O-methyl modified nucleotide
  modified_base 21: mod_base = OTHER; note = 2'-fluoro modified nucleotide
  modified_base 22: mod_base = OTHER; note = 2'-O-methyl modified nucleotide
  modified_base 23: mod_base = OTHER; note = 2'-fluoro modified nucleotide
  modified_base 24: mod_base = OTHER; note = 2'-O-methyl modified nucleotide
  modified_base 25: mod_base = OTHER; note = 2'-fluoro modified nucleotide
  modified_base 26: mod_base = OTHER; note = 2'-O-methyl modified nucleotide
  modified_base 27: mod_base = OTHER; note = 2'-fluoro modified nucleotide
  modified_base 28: mod_base = OTHER; note = 2'-O-methyl modified nucleotide
  modified_base 29: mod_base = OTHER; note = 2'-fluoro modified nucleotide
  modified_base 30: mod_base = OTHER; note = 2'-O-methyl modified nucleotide
  modified_base 31: mod_base = OTHER; note = 2'-fluoro modified nucleotide with phosphorothioate linkage
  modified_base 32: mod_base = OTHER; note = 2'-O-methyl modified nucleotide with phosphorothioate linkage
  modified_base 33: mod_base = OTHER; note = 2'-fluoro trivalent N-acetylgalactosamine modified nucleotide
ngttattttgtcaatatatttgacaaaataaca

SEQ ID NO: 1995 - RNA, 33 nt, synthetic construct
  source 1..33: mol_type = other RNA
  misc_difference 1: note = 2'-O-methyl modified nucleotide with phosphorothioate linkage may be 5' phosphate modified
  modified_base 2: mod_base = OTHER; note = 2'-fluoro modified nucleotide with phosphorothioate linkage
  modified_base 3: mod_base = OTHER; note = 2'-O-methyl modified nucleotide
  modified_base 4: mod_base = OTHER; note = 2'-fluoro modified nucleotide
  modified_base 5: mod_base = OTHER; note = 2'-O-methyl modified nucleotide
  modified_base 6: mod_base = OTHER; note = 2'-fluoro modified nucleotide
  modified_base 7: mod_base = OTHER; note = 2'-O-methyl modified nucleotide
  modified_base 8: mod_base = OTHER; note = 2'-fluoro modified nucleotide
  modified_base 9: mod_base = OTHER; note = 2'-O-methyl modified nucleotide
  modified_base 10: mod_base = OTHER; note = 2'-fluoro modified nucleotide
  modified_base 11: mod_base = OTHER; note = 2'-O-methyl modified nucleotide
  modified_base 12: mod_base = OTHER; note = 2'-fluoro modified nucleotide
  modified_base 13: mod_base = OTHER; note = 2'-O-methyl modified nucleotide
  modified_base 14: mod_base = OTHER; note = 2'-fluoro modified nucleotide with phosphorothioate linkage
  modified_base 15: mod_base = OTHER; note = 2'-O-methyl modified nucleotide with phosphorothioate linkage
  modified_base 16: mod_base = OTHER; note = 2'-fluoro modified nucleotide with phosphorothioate linkage
  modified_base 17: mod_base = OTHER; note = 2'-O-methyl modified nucleotide with phosphorothioate linkage
  modified_base 18: mod_base = OTHER; note = 2'-fluoro modified nucleotide with phosphorothioate linkage
  modified_base 19: mod_base = OTHER; note = 2'-O-methyl modified nucleotide with phosphorothioate linkage
  modified_base 20: mod_base = OTHER; note = 2'-O-methyl modified nucleotide
  modified_base 21: mod_base = OTHER; note = 2'-fluoro modified nucleotide
  modified_base 22: mod_base = OTHER; note = 2'-O-methyl modified nucleotide
  modified_base 23: mod_base = OTHER; note = 2'-fluoro modified nucleotide
  modified_base 24: mod_base = OTHER; note = 2'-O-methyl modified nucleotide
  modified_base 25: mod_base = OTHER; note = 2'-fluoro modified nucleotide
  modified_base 26: mod_base = OTHER; note = 2'-O-methyl modified nucleotide
  modified_base 27: mod_base = OTHER; note = 2'-fluoro modified nucleotide
  modified_base 28: mod_base = OTHER; note = 2'-O-methyl modified nucleotide
  modified_base 29: mod_base = OTHER; note = 2'-fluoro modified nucleotide
  modified_base 30: mod_base = OTHER; note = 2'-O-methyl modified nucleotide
  modified_base 31: mod_base = OTHER; note = 2'-fluoro modified nucleotide with phosphorothioate linkage
  modified_base 32: mod_base = OTHER; note = 2'-O-methyl modified nucleotide with phosphorothioate linkage
  modified_base 33: mod_base = OTHER; note = 2'-fluoro trivalent N-acetylgalactosamine modified nucleotide
ntacaacagaatatggtatatattctgttgtaa

SEQ ID NO: 1996 - RNA, 33 nt, synthetic construct
  source 1..33: mol_type = other RNA
  misc_difference 1: note = 2'-O-methyl modified nucleotide with phosphorothioate linkage may be 5' phosphate modified
  modified_base 2: mod_base = OTHER; note = 2'-fluoro modified nucleotide with phosphorothioate linkage
  modified_base 3: mod_base = OTHER; note = 2'-O-methyl modified nucleotide
  modified_base 4: mod_base = OTHER; note = 2'-fluoro modified nucleotide
  modified_base 5: mod_base = OTHER; note = 2'-O-methyl modified nucleotide
  modified_base 6: mod_base = OTHER; note = 2'-fluoro modified nucleotide
  modified_base 7: mod_base = OTHER; note = 2'-O-methyl modified nucleotide
  modified_base 8: mod_base = OTHER; note = 2'-fluoro modified nucleotide
  modified_base 9: mod_base = OTHER; note = 2'-O-methyl modified nucleotide
  modified_base 10: mod_base = OTHER; note = 2'-fluoro modified nucleotide
  modified_base 11: mod_base = OTHER; note = 2'-O-methyl modified nucleotide
  modified_base 12: mod_base = OTHER; note = 2'-fluoro modified nucleotide
  modified_base 13: mod_base = OTHER; note = 2'-O-methyl modified nucleotide
  modified_base 14: mod_base = OTHER; note = 2'-fluoro modified nucleotide with phosphorothioate linkage
  modified_base 15: mod_base = OTHER; note = 2'-O-methyl modified nucleotide with phosphorothioate linkage
  modified_base 16: mod_base = OTHER; note = 2'-fluoro modified nucleotide with phosphorothioate linkage
  modified_base 17: mod_base = OTHER; note = 2'-O-methyl modified nucleotide with phosphorothioate linkage
  modified_base 18: mod_base = OTHER; note = 2'-fluoro modified nucleotide with phosphorothioate linkage
  modified_base 19: mod_base = OTHER; note = 2'-O-methyl modified nucleotide with phosphorothioate linkage
  modified_base 20: mod_base = OTHER; note = 2'-O-methyl modified nucleotide
  modified_base 21: mod_base = OTHER; note = 2'-fluoro modified nucleotide
  modified_base 22: mod_base = OTHER; note = 2'-O-methyl modified nucleotide
  modified_base 23: mod_base = OTHER; note = 2'-fluoro modified nucleotide
  modified_base 24: mod_base = OTHER; note = 2'-O-methyl modified nucleotide
  modified_base 25: mod_base = OTHER; note = 2'-fluoro modified nucleotide
  modified_base 26: mod_base = OTHER; note = 2'-O-methyl modified nucleotide
  modified_base 27: mod_base = OTHER; note = 2'-fluoro modified nucleotide
  modified_base 28: mod_base = OTHER; note = 2'-O-methyl modified nucleotide
  modified_base 29: mod_base = OTHER; note = 2'-fluoro modified nucleotide
  modified_base 30: mod_base = OTHER; note = 2'-O-methyl modified nucleotide
  modified_base 31: mod_base = OTHER; note = 2'-fluoro modified nucleotide with phosphorothioate linkage
  modified_base 32: mod_base = OTHER; note = 2'-O-methyl modified nucleotide with phosphorothioate linkage
  modified_base 33: mod_base = OTHER; note = 2'-fluoro trivalent N-acetylgalactosamine modified nucleotide
nttattttgtcaatatatgattgacaaaataaa

SEQ ID NO: 1997 - RNA, 33 nt, synthetic construct
  source 1..33: mol_type = other RNA
  misc_difference 1: note = 2'-O-methyl modified nucleotide with phosphorothioate linkage may be 5' phosphate modified
  modified_base 2: mod_base = OTHER; note = 2'-fluoro modified nucleotide with phosphorothioate linkage
  modified_base 3: mod_base = OTHER; note = 2'-O-methyl modified nucleotide
  modified_base 4: mod_base = OTHER; note = 2'-fluoro modified nucleotide
  modified_base 5: mod_base = OTHER; note = 2'-O-methyl modified nucleotide
  modified_base 6: mod_base = OTHER; note = 2'-fluoro modified nucleotide
  modified_base 7: mod_base = OTHER; note = 2'-O-methyl modified nucleotide
  modified_base 8: mod_base = OTHER; note = 2'-fluoro modified nucleotide
  modified_base 9: mod_base = OTHER; note = 2'-O-methyl modified nucleotide
  modified_base 10: mod_base = OTHER; note = 2'-fluoro modified nucleotide
  modified_base 11: mod_base = OTHER; note = 2'-O-methyl modified nucleotide
  modified_base 12: mod_base = OTHER; note = 2'-fluoro modified nucleotide
  modified_base 13: mod_base = OTHER; note = 2'-O-methyl modified nucleotide
  modified_base 14: mod_base = OTHER; note = 2'-fluoro modified nucleotide with phosphorothioate linkage
  modified_base 15: mod_base = OTHER; note = 2'-O-methyl modified nucleotide with phosphorothioate linkage
  modified_base 16: mod_base = OTHER; note = 2'-fluoro modified nucleotide with phosphorothioate linkage
  modified_base 17: mod_base = OTHER; note = 2'-O-methyl modified nucleotide with phosphorothioate linkage
  modified_base 18: mod_base = OTHER; note = 2'-fluoro modified nucleotide with phosphorothioate linkage
  modified_base 19: mod_base = OTHER; note = 2'-O-methyl modified nucleotide with phosphorothioate linkage
  modified_base 20: mod_base = OTHER; note = 2'-O-methyl modified nucleotide
  modified_base 21: mod_base = OTHER; note = 2'-fluoro modified nucleotide
  modified_base 22: mod_base = OTHER; note = 2'-O-methyl modified nucleotide
  modified_base 23: mod_base = OTHER; note = 2'-fluoro modified nucleotide
  modified_base 24: mod_base = OTHER; note = 2'-O-methyl modified nucleotide
  modified_base 25: mod_base = OTHER; note = 2'-fluoro modified nucleotide
  modified_base 26: mod_base = OTHER; note = 2'-O-methyl modified nucleotide
  modified_base 27: mod_base = OTHER; note = 2'-fluoro modified nucleotide
  modified_base 28: mod_base = OTHER; note = 2'-O-methyl modified nucleotide
  modified_base 29: mod_base = OTHER; note = 2'-fluoro modified nucleotide
  modified_base 30: mod_base = OTHER; note = 2'-O-methyl modified nucleotide
  modified_base 31: mod_base = OTHER; note = 2'-fluoro modified nucleotide with phosphorothioate linkage
  modified_base 32: mod_base = OTHER; note = 2'-O-methyl modified nucleotide with phosphorothioate linkage
  modified_base 33: mod_base = OTHER; note = 2'-fluoro trivalent N-acetylgalactosamine modified nucleotide
naggcttcaggaaaagaggtttcctgaagccta

SEQ ID NO: 1998 - RNA, 33 nt, synthetic construct
  source 1..33: mol_type = other RNA
  misc_difference 1: note = 2'-O-methyl modified nucleotide with phosphorothioate linkage may be 5' phosphate modified
  modified_base 2: mod_base = OTHER; note = 2'-fluoro modified nucleotide with phosphorothioate linkage
  modified_base 3: mod_base = OTHER; note = 2'-O-methyl modified nucleotide
  modified_base 4: mod_base = OTHER; note = 2'-fluoro modified nucleotide
  modified_base 5: mod_base = OTHER; note = 2'-O-methyl modified nucleotide
  modified_base 6: mod_base = OTHER; note = 2'-fluoro modified nucleotide
  modified_base 7: mod_base = OTHER; note = 2'-O-methyl modified nucleotide
  modified_base 8: mod_base = OTHER; note = 2'-fluoro modified nucleotide
  modified_base 9: mod_base = OTHER; note = 2'-O-methyl modified nucleotide
  modified_base 10: mod_base = OTHER; note = 2'-fluoro modified nucleotide
  modified_base 11: mod_base = OTHER; note = 2'-O-methyl modified nucleotide
  modified_base 12: mod_base = OTHER; note = 2'-fluoro modified nucleotide
  modified_base 13: mod_base = OTHER; note = 2'-O-methyl modified nucleotide
  modified_base 14: mod_base = OTHER; note = 2'-fluoro modified nucleotide with phosphorothioate linkage
  modified_base 15: mod_base = OTHER; note = 2'-O-methyl modified nucleotide with phosphorothioate linkage
  modified_base 16: mod_base = OTHER; note = 2'-fluoro modified nucleotide with phosphorothioate linkage
  modified_base 17: mod_base = OTHER; note = 2'-O-methyl modified nucleotide with phosphorothioate linkage
  modified_base 18: mod_base = OTHER; note = 2'-fluoro modified nucleotide with phosphorothioate linkage
  modified_base 19: mod_base = OTHER; note = 2'-O-methyl modified nucleotide with phosphorothioate linkage
  modified_base 20: mod_base = OTHER; note = 2'-O-methyl modified nucleotide
  modified_base 21: mod_base = OTHER; note = 2'-fluoro modified nucleotide
  modified_base 22: mod_base = OTHER; note = 2'-O-methyl modified nucleotide
  modified_base 23: mod_base = OTHER; note = 2'-fluoro modified nucleotide
  modified_base 24: mod_base = OTHER; note = 2'-O-methyl modified nucleotide
  modified_base 25: mod_base = OTHER; note = 2'-fluoro modified nucleotide
  modified_base 26: mod_base = OTHER; note = 2'-O-methyl modified nucleotide
  modified_base 27: mod_base = OTHER; note = 2'-fluoro modified nucleotide
  modified_base 28: mod_base = OTHER; note = 2'-O-methyl modified nucleotide
  modified_base 29: mod_base = OTHER; note = 2'-fluoro modified nucleotide
  modified_base 30: mod_base = OTHER; note = 2'-O-methyl modified nucleotide
  modified_base 31: mod_base = OTHER; note = 2'-fluoro modified nucleotide with phosphorothioate linkage
  modified_base 32: mod_base = OTHER; note = 2'-O-methyl modified nucleotide with phosphorothioate linkage
  modified_base 33: mod_base = OTHER; note = 2'-fluoro trivalent N-acetylgalactosamine modified nucleotide
nggaaaagagataattccattatctcttttcca

SEQ ID NO: 1999 - RNA, 33 nt, synthetic construct
  source 1..33: mol_type = other RNA
  misc_difference 1: note = 2'-O-methyl modified nucleotide with phosphorothioate linkage may be 5' phosphate modified
  modified_base 2: mod_base = OTHER; note = 2'-fluoro modified nucleotide with phosphorothioate linkage
  modified_base 3: mod_base = OTHER; note = 2'-O-methyl modified nucleotide
  modified_base 4: mod_base = OTHER; note = 2'-fluoro modified nucleotide
  modified_base 5: mod_base = OTHER; note = 2'-O-methyl modified nucleotide
  modified_base 6: mod_base = OTHER; note = 2'-fluoro modified nucleotide
  modified_base 7: mod_base = OTHER; note = 2'-O-methyl modified nucleotide
  modified_base 8: mod_base = OTHER; note = 2'-fluoro modified nucleotide
  modified_base 9: mod_base = OTHER; note = 2'-O-methyl modified nucleotide
  modified_base 10: mod_base = OTHER; note = 2'-fluoro modified nucleotide
  modified_base 11: mod_base = OTHER; note = 2'-O-methyl modified nucleotide
  modified_base 12: mod_base = OTHER; note = 2'-fluoro modified nucleotide
  modified_base 13: mod_base = OTHER; note = 2'-O-methyl modified nucleotide
  modified_base 14: mod_base = OTHER; note = 2'-fluoro modified nucleotide with phosphorothioate linkage
  modified_base 15: mod_base = OTHER; note = 2'-O-methyl modified nucleotide with phosphorothioate linkage
  modified_base 16: mod_base = OTHER; note = 2'-fluoro modified nucleotide with phosphorothioate linkage
  modified_base 17: mod_base = OTHER; note = 2'-O-methyl modified nucleotide with phosphorothioate linkage
  modified_base 18: mod_base = OTHER; note = 2'-fluoro modified nucleotide with phosphorothioate linkage
  modified_base 19: mod_base = OTHER; note = 2'-O-methyl modified nucleotide with phosphorothioate linkage
  modified_base 20: mod_base = OTHER; note = 2'-O-methyl modified nucleotide
  modified_base 21: mod_base = OTHER; note = 2'-fluoro modified nucleotide
  modified_base 22: mod_base = OTHER; note = 2'-O-methyl modified nucleotide
  modified_base 23: mod_base = OTHER; note = 2'-fluoro modified nucleotide
  modified_base 24: mod_base = OTHER; note = 2'-O-methyl modified nucleotide
  modified_base 25: mod_base = OTHER; note = 2'-fluoro modified nucleotide
  modified_base 26: mod_base = OTHER; note = 2'-O-methyl modified nucleotide
  modified_base 27: mod_base = OTHER; note = 2'-fluoro modified nucleotide
  modified_base 28: mod_base = OTHER; note = 2'-O-methyl modified nucleotide
  modified_base 29: mod_base = OTHER; note = 2'-fluoro modified nucleotide
  modified_base 30: mod_base = OTHER; note = 2'-O-methyl modified nucleotide
  modified_base 31: mod_base = OTHER; note = 2'-fluoro modified nucleotide with phosphorothioate linkage
  modified_base 32: mod_base = OTHER; note = 2'-O-methyl modified nucleotide with phosphorothioate linkage
  modified_base 33: mod_base = OTHER; note = 2'-fluoro trivalent N-acetylgalactosamine modified nucleotide
ngttacagcaatataaaggatattgctgtaaca

SEQ ID NO: 2000 - RNA, 33 nt, synthetic construct
  source 1..33: mol_type = other RNA
  misc_difference 1: note = 2'-O-methyl modified nucleotide with phosphorothioate linkage may be 5' phosphate modified
  modified_base 2: mod_base = OTHER; note = 2'-fluoro modified nucleotide with phosphorothioate linkage
  modified_base 3: mod_base = OTHER; note = 2'-O-methyl modified nucleotide
  modified_base 4: mod_base = OTHER; note = 2'-fluoro modified nucleotide
  modified_base 5: mod_base = OTHER; note = 2'-O-methyl modified nucleotide
  modified_base 6: mod_base = OTHER; note = 2'-fluoro modified nucleotide
  modified_base 7: mod_base = OTHER; note = 2'-O-methyl modified nucleotide
  modified_base 8: mod_base = OTHER; note = 2'-fluoro modified nucleotide
  modified_base 9: mod_base = OTHER; note = 2'-O-methyl modified nucleotide
  modified_base 10: mod_base = OTHER; note = 2'-fluoro modified nucleotide
  modified_base 11: mod_base = OTHER; note = 2'-O-methyl modified nucleotide
  modified_base 12: mod_base = OTHER; note = 2'-fluoro modified nucleotide
  modified_base 13: mod_base = OTHER; note = 2'-O-methyl modified nucleotide
  modified_base 14: mod_base = OTHER; note = 2'-fluoro modified nucleotide with phosphorothioate linkage
  modified_base 15: mod_base = OTHER; note = 2'-O-methyl modified nucleotide with phosphorothioate linkage
  modified_base 16: mod_base = OTHER; note = 2'-fluoro modified nucleotide with phosphorothioate linkage
  modified_base 17: mod_base = OTHER; note = 2'-O-methyl modified nucleotide with phosphorothioate linkage
  modified_base 18: mod_base = OTHER; note = 2'-fluoro modified nucleotide with phosphorothioate linkage
  modified_base 19: mod_base = OTHER; note = 2'-O-methyl modified nucleotide with phosphorothioate linkage
  modified_base 20: mod_base = OTHER; note = 2'-O-methyl modified nucleotide
  modified_base 21: mod_base = OTHER; note = 2'-fluoro modified nucleotide
  modified_base 22: mod_base = OTHER; note = 2'-O-methyl modified nucleotide
  modified_base 23: mod_base = OTHER; note = 2'-fluoro modified nucleotide
  modified_base 24: mod_base = OTHER; note = 2'-O-methyl modified nucleotide
  modified_base 25: mod_base = OTHER; note = 2'-fluoro modified nucleotide
  modified_base 26: mod_base = OTHER; note = 2'-O-methyl modified nucleotide
  modified_base 27: mod_base = OTHER; note = 2'-fluoro modified nucleotide
  modified_base 28: mod_base = OTHER; note = 2'-O-methyl modified nucleotide
  modified_base 29: mod_base = OTHER; note = 2'-fluoro modified nucleotide
  modified_base 30: mod_base = OTHER; note = 2'-O-methyl modified nucleotide
  modified_base 31: mod_base = OTHER; note = 2'-fluoro modified nucleotide with phosphorothioate linkage
  modified_base 32: mod_base = OTHER; note = 2'-O-methyl modified nucleotide with phosphorothioate linkage
  modified_base 33: mod_base = OTHER; note = 2'-fluoro trivalent N-acetylgalactosamine modified nucleotide
nataagcatatgcaatctctgcatatgcttata

SEQ ID NO: 2001 - RNA, 33 nt, synthetic construct
  source 1..33: mol_type = other RNA
  misc_difference 1: note = 2'-O-methyl modified nucleotide with phosphorothioate linkage may be 5' phosphate modified
  modified_base 2: mod_base = OTHER; note = 2'-fluoro modified nucleotide with phosphorothioate linkage
  modified_base 3: mod_base = OTHER; note = 2'-O-methyl modified nucleotide
  modified_base 4: mod_base = OTHER; note = 2'-fluoro modified nucleotide
  modified_base 5: mod_base = OTHER; note = 2'-O-methyl modified nucleotide
  modified_base 6: mod_base = OTHER; note = 2'-fluoro modified nucleotide
  modified_base 7: mod_base = OTHER; note = 2'-O-methyl modified nucleotide
  modified_base 8: mod_base = OTHER; note = 2'-fluoro modified nucleotide
  modified_base 9: mod_base = OTHER; note = 2'-O-methyl modified nucleotide
  modified_base 10: mod_base = OTHER; note = 2'-fluoro modified nucleotide
  modified_base 11: mod_base = OTHER; note = 2'-O-methyl modified nucleotide
  modified_base 12: mod_base = OTHER; note = 2'-fluoro modified nucleotide
  modified_base 13: mod_base = OTHER; note = 2'-O-methyl modified nucleotide
  modified_base 14: mod_base = OTHER; note = 2'-fluoro modified nucleotide with phosphorothioate linkage
  modified_base 15: mod_base = OTHER; note = 2'-O-methyl modified nucleotide with phosphorothioate linkage
  modified_base 16: mod_base = OTHER; note = 2'-fluoro modified nucleotide with phosphorothioate linkage
  modified_base 17: mod_base = OTHER; note = 2'-O-methyl modified nucleotide with phosphorothioate linkage
  modified_base 18: mod_base = OTHER; note = 2'-fluoro modified nucleotide with phosphorothioate linkage
  modified_base 19: mod_base = OTHER; note = 2'-O-methyl modified nucleotide with phosphorothioate linkage
  modified_base 20: mod_base = OTHER; note = 2'-O-methyl modified nucleotide
  modified_base 21: mod_base = OTHER; note = 2'-fluoro modified nucleotide
  modified_base 22: mod_base = OTHER; note = 2'-O-methyl modified nucleotide
  modified_base 23: mod_base = OTHER; note = 2'-fluoro modified nucleotide
  modified_base 24: mod_base = OTHER; note = 2'-O-methyl modified nucleotide
  modified_base 25: mod_base = OTHER; note = 2'-fluoro modified nucleotide
  modified_base 26: mod_base = OTHER; note = 2'-O-methyl modified nucleotide
  modified_base 27: mod_base = OTHER; note = 2'-fluoro modified nucleotide
  modified_base 28: mod_base = OTHER; note = 2'-O-methyl modified nucleotide
  modified_base 29: mod_base = OTHER; note = 2'-fluoro modified nucleotide
  modified_base 30: mod_base = OTHER; note = 2'-O-methyl modified nucleotide
  modified_base 31: mod_base = OTHER; note = 2'-fluoro modified nucleotide with phosphorothioate linkage
  modified_base 32: mod_base = OTHER; note = 2'-O-methyl modified nucleotide with phosphorothioate linkage
  modified_base 33: mod_base = OTHER; note = 2'-fluoro trivalent N-acetylgalactosamine modified nucleotide
natattctttaacttcaaaagttaaagaatata

SEQ ID NO: 2002 - RNA, 33 nt, synthetic construct
  source 1..33: mol_type = other RNA
  misc_difference 1: note = 2'-O-methyl modified nucleotide with phosphorothioate linkage may be 5' phosphate modified
  modified_base 2: mod_base = OTHER; note = 2'-fluoro modified nucleotide with phosphorothioate linkage
  modified_base 3: mod_base = OTHER; note = 2'-O-methyl modified nucleotide
  modified_base 4: mod_base = OTHER; note = 2'-fluoro modified nucleotide
  modified_base 5: mod_base = OTHER; note = 2'-O-methyl modified nucleotide
  modified_base 6: mod_base = OTHER; note = 2'-fluoro modified nucleotide
  modified_base 7: mod_base = OTHER; note = 2'-O-methyl modified nucleotide
  modified_base 8: mod_base = OTHER; note = 2'-fluoro modified nucleotide
  modified_base 9: mod_base = OTHER; note = 2'-O-methyl modified nucleotide
  modified_base 10: mod_base = OTHER; note = 2'-fluoro modified nucleotide
  modified_base 11: mod_base = OTHER; note = 2'-O-methyl modified nucleotide
  modified_base 12: mod_base = OTHER; note = 2'-fluoro modified nucleotide
  modified_base 13: mod_base = OTHER; note = 2'-O-methyl modified nucleotide
  modified_base 14: mod_base = OTHER; note = 2'-fluoro modified nucleotide with phosphorothioate linkage
  modified_base 15: mod_base = OTHER; note = 2'-O-methyl modified nucleotide with phosphorothioate linkage
  modified_base 16: mod_base = OTHER; note = 2'-fluoro modified nucleotide with phosphorothioate linkage
  modified_base 17: mod_base = OTHER; note = 2'-O-methyl modified nucleotide with phosphorothioate linkage
  modified_base 18: mod_base = OTHER; note = 2'-fluoro modified nucleotide with phosphorothioate linkage
  modified_base 19: mod_base = OTHER; note = 2'-O-methyl modified nucleotide with phosphorothioate linkage
  modified_base 20: mod_base = OTHER; note = 2'-O-methyl modified nucleotide
  modified_base 21: mod_base = OTHER; note = 2'-fluoro modified nucleotide
  modified_base 22: mod_base = OTHER; note = 2'-O-methyl modified nucleotide
  modified_base 23: mod_base = OTHER; note = 2'-fluoro modified nucleotide
  modified_base 24: mod_base = OTHER; note = 2'-O-methyl modified nucleotide
  modified_base 25: mod_base = OTHER; note = 2'-fluoro modified nucleotide
  modified_base 26: mod_base = OTHER; note = 2'-O-methyl modified nucleotide
  modified_base 27: mod_base = OTHER; note = 2'-fluoro modified nucleotide
  modified_base 28: mod_base = OTHER; note = 2'-O-methyl modified nucleotide
  modified_base 29: mod_base = OTHER; note = 2'-fluoro modified nucleotide
  modified_base 30: mod_base = OTHER; note = 2'-O-methyl modified nucleotide
  modified_base 31: mod_base = OTHER; note = 2'-fluoro modified nucleotide with phosphorothioate linkage
  modified_base 32: mod_base = OTHER; note = 2'-O-methyl modified nucleotide with phosphorothioate linkage
  modified_base 33: mod_base = OTHER; note = 2'-fluoro trivalent N-acetylgalactosamine modified nucleotide
nagacatctttgaacacctttcaaagatgtcta

SEQ ID NO: 2003 - RNA, 33 nt, synthetic construct
  source 1..33: mol_type = other RNA
  misc_difference 1: note = 2'-O-methyl modified nucleotide with phosphorothioate linkage may be 5' phosphate modified
  modified_base 2: mod_base = OTHER; note = 2'-fluoro modified nucleotide with phosphorothioate linkage
  modified_base 3: mod_base = OTHER; note = 2'-O-methyl modified nucleotide
  modified_base 4: mod_base = OTHER; note = 2'-fluoro modified nucleotide
  modified_base 5: mod_base = OTHER; note = 2'-O-methyl modified nucleotide
  modified_base 6: mod_base = OTHER; note = 2'-fluoro modified nucleotide
  modified_base 7: mod_base = OTHER; note = 2'-O-methyl modified nucleotide
  modified_base 8: mod_base = OTHER; note = 2'-fluoro modified nucleotide
  modified_base 9: mod_base = OTHER; note = 2'-O-methyl modified nucleotide
  modified_base 10: mod_base = OTHER; note = 2'-fluoro modified nucleotide
  modified_base 11: mod_base = OTHER; note = 2'-O-methyl modified nucleotide
  modified_base 12: mod_base = OTHER; note = 2'-fluoro modified nucleotide
  modified_base 13: mod_base = OTHER; note = 2'-O-methyl modified nucleotide
  modified_base 14: mod_base = OTHER; note = 2'-fluoro modified nucleotide with phosphorothioate linkage
  modified_base 15: mod_base = OTHER; note = 2'-O-methyl modified nucleotide with phosphorothioate linkage
  modified_base 16: mod_base = OTHER; note = 2'-fluoro modified nucleotide with phosphorothioate linkage
  modified_base 17: mod_base = OTHER; note = 2'-O-methyl modified nucleotide with phosphorothioate linkage
  modified_base 18: mod_base = OTHER; note = 2'-fluoro modified nucleotide with phosphorothioate linkage
  modified_base 19: mod_base = OTHER; note = 2'-O-methyl modified nucleotide with phosphorothioate linkage
  modified_base 20: mod_base = OTHER; note = 2'-O-methyl modified nucleotide
  modified_base 21: mod_base = OTHER; note = 2'-fluoro modified nucleotide
  modified_base 22: mod_base = OTHER; note = 2'-O-methyl modified nucleotide
  modified_base 23: mod_base = OTHER; note = 2'-fluoro modified nucleotide
  modified_base 24: mod_base = OTHER; note = 2'-O-methyl modified nucleotide
  modified_base 25: mod_base = OTHER; note = 2'-fluoro modified nucleotide
  modified_base 26: mod_base = OTHER; note = 2'-O-methyl modified nucleotide
  modified_base 27: mod_base = OTHER; note = 2'-fluoro modified nucleotide
  modified_base 28: mod_base = OTHER; note = 2'-O-methyl modified nucleotide
  modified_base 29: mod_base = OTHER; note = 2'-fluoro modified nucleotide
  modified_base 30: mod_base = OTHER; note = 2'-O-methyl modified nucleotide
  modified_base 31: mod_base = OTHER; note = 2'-fluoro modified nucleotide with phosphorothioate linkage
  modified_base 32: mod_base = OTHER; note = 2'-O-methyl modified nucleotide with phosphorothioate linkage
  modified_base 33: mod_base = OTHER; note = 2'-fluoro trivalent N-acetylgalactosamine modified nucleotide
ncaggaagacatctttgaaagatgtcttcctga

SEQ ID NO: 2004 - RNA, 33 nt, synthetic construct
  source 1..33: mol_type = other RNA
  misc_difference 1: note = 2'-O-methyl modified nucleotide with phosphorothioate linkage may be 5' phosphate modified
  modified_base 2: mod_base = OTHER; note = 2'-fluoro modified nucleotide with phosphorothioate linkage
  modified_base 3: mod_base = OTHER; note = 2'-O-methyl modified nucleotide
  modified_base 4: mod_base = OTHER; note = 2'-fluoro modified nucleotide
  modified_base 5: mod_base = OTHER; note = 2'-O-methyl modified nucleotide
  modified_base 6: mod_base = OTHER; note = 2'-fluoro modified nucleotide
  modified_base 7: mod_base = OTHER; note = 2'-O-methyl modified nucleotide
  modified_base 8: mod_base = OTHER; note = 2'-fluoro modified nucleotide
  modified_base 9: mod_base = OTHER; note = 2'-O-methyl modified nucleotide
  modified_base 10: mod_base = OTHER; note = 2'-fluoro modified nucleotide
  modified_base 11: mod_base = OTHER; note = 2'-O-methyl modified nucleotide
  modified_base 12: mod_base = OTHER; note = 2'-fluoro modified nucleotide
  modified_base 13: mod_base = OTHER; note = 2'-O-methyl modified nucleotide
  modified_base 14: mod_base = OTHER; note = 2'-fluoro modified nucleotide with phosphorothioate linkage
  modified_base 15: mod_base = OTHER; note = 2'-O-methyl modified nucleotide with phosphorothioate linkage
  modified_base 16: mod_base = OTHER; note = 2'-fluoro modified nucleotide with phosphorothioate linkage
  modified_base 17: mod_base = OTHER; note = 2'-O-methyl modified nucleotide with phosphorothioate linkage
  modified_base 18: mod_base = OTHER; note = 2'-fluoro modified nucleotide with phosphorothioate linkage
  modified_base 19: mod_base = OTHER; note = 2'-O-methyl modified nucleotide with phosphorothioate linkage
  modified_base 20: mod_base = OTHER; note = 2'-O-methyl modified nucleotide
  modified_base 21: mod_base = OTHER; note = 2'-fluoro modified nucleotide
  modified_base 22: mod_base = OTHER; note = 2'-O-methyl modified nucleotide
  modified_base 23: mod_base = OTHER; note = 2'-fluoro modified nucleotide
  modified_base 24: mod_base = OTHER; note = 2'-O-methyl modified nucleotide
  modified_base 25: mod_base = OTHER; note = 2'-fluoro modified nucleotide
  modified_base 26: mod_base = OTHER; note = 2'-O-methyl modified nucleotide
  modified_base 27: mod_base = OTHER; note = 2'-fluoro modified nucleotide
  modified_base 28: mod_base = OTHER; note = 2'-O-methyl modified nucleotide
  modified_base 29: mod_base = OTHER; note = 2'-fluoro modified nucleotide
  modified_base 30: mod_base = OTHER; note = 2'-O-methyl modified nucleotide
  modified_base 31: mod_base = OTHER; note = 2'-fluoro modified nucleotide with phosphorothioate linkage
  modified_base 32: mod_base = OTHER; note = 2'-O-methyl modified nucleotide with phosphorothioate linkage
  modified_base 33: mod_base = OTHER; note = 2'-fluoro trivalent N-acetylgalactosamine modified nucleotide
nacagcaatataaaggtactttatattgctgta

SEQ ID NO: 2005 - RNA, 33 nt, synthetic construct
  source 1..33: mol_type = other RNA
  misc_difference 1: note = 2'-O-methyl modified nucleotide with phosphorothioate linkage may be 5' phosphate modified
  modified_base 2: mod_base = OTHER; note = 2'-fluoro modified nucleotide with phosphorothioate linkage
  modified_base 3: mod_base = OTHER; note = 2'-O-methyl modified nucleotide
  modified_base 4: mod_base = OTHER; note = 2'-fluoro modified nucleotide
  modified_base 5: mod_base = OTHER; note = 2'-O-methyl modified nucleotide
  modified_base 6: mod_base = OTHER; note = 2'-fluoro modified nucleotide
  modified_base 7: mod_base = OTHER; note = 2'-O-methyl modified nucleotide
  modified_base 8: mod_base = OTHER; note = 2'-fluoro modified nucleotide
  modified_base 9: mod_base = OTHER; note = 2'-O-methyl modified nucleotide
  modified_base 10: mod_base = OTHER; note = 2'-fluoro modified nucleotide
  modified_base 11: mod_base = OTHER; note = 2'-O-methyl modified nucleotide
  modified_base 12: mod_base = OTHER; note = 2'-fluoro modified nucleotide
  modified_base 13: mod_base = OTHER; note = 2'-O-methyl modified nucleotide
  modified_base 14: mod_base = OTHER; note = 2'-fluoro modified nucleotide with phosphorothioate linkage
  modified_base 15: mod_base = OTHER; note = 2'-O-methyl modified nucleotide with phosphorothioate linkage
  modified_base 16: mod_base = OTHER; note = 2'-fluoro modified nucleotide with phosphorothioate linkage
  modified_base 17: mod_base = OTHER; note = 2'-O-methyl modified nucleotide with phosphorothioate linkage
  modified_base 18: mod_base = OTHER; note = 2'-fluoro modified nucleotide with phosphorothioate linkage
  modified_base 19: mod_base = OTHER; note = 2'-O-methyl modified nucleotide with phosphorothioate linkage
  modified_base 20: mod_base = OTHER; note = 2'-O-methyl modified nucleotide
  modified_base 21: mod_base = OTHER; note = 2'-fluoro modified nucleotide
  modified_base 22: mod_base = OTHER; note = 2'-O-methyl modified nucleotide
  modified_base 23: mod_base = OTHER; note = 2'-fluoro modified nucleotide
  modified_base 24: mod_base = OTHER; note = 2'-O-methyl modified nucleotide
  modified_base 25: mod_base = OTHER; note = 2'-fluoro modified nucleotide
  modified_base 26: mod_base = OTHER; note = 2'-O-methyl modified nucleotide
  modified_base 27: mod_base = OTHER; note = 2'-fluoro modified nucleotide
  modified_base 28: mod_base = OTHER; note = 2'-O-methyl modified nucleotide
  modified_base 29: mod_base = OTHER; note = 2'-fluoro modified nucleotide
  modified_base 30: mod_base = OTHER; note = 2'-O-methyl modified nucleotide
  modified_base 31: mod_base = OTHER; note = 2'-fluoro modified nucleotide with phosphorothioate linkage
  modified_base 32: mod_base = OTHER; note = 2'-O-methyl modified nucleotide with phosphorothioate linkage
  modified_base 33: mod_base = OTHER; note = 2'-fluoro trivalent N-acetylgalactosamine modified nucleotide
nattgtcataggttattggaacctatgacaata

SEQ ID NO: 2006 - RNA, 33 nt, synthetic construct
  source 1..33: mol_type = other RNA
  misc_difference 1: note = 2'-O-methyl modified nucleotide with phosphorothioate linkage may be 5' phosphate modified
  modified_base 2: mod_base = OTHER; note = 2'-fluoro modified nucleotide with phosphorothioate linkage
  modified_base 3: mod_base = OTHER; note = 2'-O-methyl modified nucleotide
  modified_base 4: mod_base = OTHER; note = 2'-fluoro modified nucleotide
  modified_base 5: mod_base = OTHER; note = 2'-O-methyl modified nucleotide
  modified_base 6: mod_base = OTHER; note = 2'-fluoro modified nucleotide
  modified_base 7: mod_base = OTHER; note = 2'-O-methyl modified nucleotide
  modified_base 8: mod_base = OTHER; note = 2'-fluoro modified nucleotide
  modified_base 9: mod_base = OTHER; note = 2'-O-methyl modified nucleotide
  modified_base 10: mod_base = OTHER; note = 2'-fluoro modified nucleotide
  modified_base 11: mod_base = OTHER; note = 2'-O-methyl modified nucleotide
  modified_base 12: mod_base = OTHER; note = 2'-fluoro modified nucleotide
  modified_base 13: mod_base = OTHER; note = 2'-O-methyl modified nucleotide
  modified_base 14: mod_base = OTHER; note = 2'-fluoro modified nucleotide with phosphorothioate linkage
  modified_base 15: mod_base = OTHER; note = 2'-O-methyl modified nucleotide with phosphorothioate linkage
  modified_base 16: mod_base = OTHER; note = 2'-fluoro modified nucleotide with phosphorothioate linkage
  modified_base 17: mod_base = OTHER; note = 2'-O-methyl modified nucleotide with phosphorothioate linkage
  modified_base 18: mod_base = OTHER; note = 2'-fluoro modified nucleotide with phosphorothioate linkage
  modified_base 19: mod_base = OTHER; note = 2'-O-methyl modified nucleotide with phosphorothioate linkage
  modified_base 20: mod_base = OTHER; note = 2'-O-methyl modified nucleotide
  modified_base 21: mod_base = OTHER; note = 2'-fluoro modified nucleotide
  modified_base 22: mod_base = OTHER; note = 2'-O-methyl modified nucleotide
  modified_base 23: mod_base = OTHER; note = 2'-fluoro modified nucleotide
  modified_base 24: mod_base = OTHER; note = 2'-O-methyl modified nucleotide
  modified_base 25: mod_base = OTHER; note = 2'-fluoro modified nucleotide
  modified_base 26: mod_base = OTHER; note = 2'-O-methyl modified nucleotide
  modified_base 27: mod_base = OTHER; note = 2'-fluoro modified nucleotide
  modified_base 28: mod_base = OTHER; note = 2'-O-methyl modified nucleotide
  modified_base 29: mod_base = OTHER; note = 2'-fluoro modified nucleotide
  modified_base 30: mod_base = OTHER; note = 2'-O-methyl modified nucleotide
  modified_base 31: mod_base = OTHER; note = 2'-fluoro modified nucleotide with phosphorothioate linkage
  modified_base 32: mod_base = OTHER; note = 2'-O-methyl modified nucleotide with phosphorothioate linkage
  modified_base 33: mod_base = OTHER; note = 2'-fluoro trivalent N-acetylgalactosamine modified nucleotide
ngagttattttgtcaatatgacaaaataactca

SEQ ID NO: 2007 - RNA, 33 nt, synthetic construct
  source 1..33: mol_type = other RNA
  misc_difference 1: note = 2'-O-methyl modified nucleotide with phosphorothioate linkage may be 5' phosphate modified
  modified_base 2: mod_base = OTHER; note = 2'-fluoro modified nucleotide with phosphorothioate linkage
  modified_base 3: mod_base = OTHER; note = 2'-O-methyl modified nucleotide
  modified_base 4: mod_base = OTHER; note = 2'-fluoro modified nucleotide
  modified_base 5: mod_base = OTHER; note = 2'-O-methyl modified nucleotide
  modified_base 6: mod_base = OTHER; note = 2'-fluoro modified nucleotide
  modified_base 7: mod_base = OTHER; note = 2'-O-methyl modified nucleotide
  modified_base 8: mod_base = OTHER; note = 2'-fluoro modified nucleotide
  modified_base 9: mod_base = OTHER; note = 2'-O-methyl modified nucleotide
  modified_base 10: mod_base = OTHER; note = 2'-fluoro modified nucleotide
  modified_base 11: mod_base = OTHER; note = 2'-O-methyl modified nucleotide
  modified_base 12: mod_base = OTHER; note = 2'-fluoro modified nucleotide
  modified_base 13: mod_base = OTHER; note = 2'-O-methyl modified nucleotide
  modified_base 14: mod_base = OTHER; note = 2'-fluoro modified nucleotide with phosphorothioate linkage
  modified_base 15: mod_base = OTHER; note = 2'-O-methyl modified nucleotide with phosphorothioate linkage
  modified_base 16: mod_base = OTHER; note = 2'-fluoro modified nucleotide with phosphorothioate linkage
  modified_base 17: mod_base = OTHER; note = 2'-O-methyl modified nucleotide with phosphorothioate linkage
  modified_base 18: mod_base = OTHER; note = 2'-fluoro modified nucleotide with phosphorothioate linkage
  modified_base 19: mod_base = OTHER; note = 2'-O-methyl modified nucleotide with phosphorothioate linkage
  modified_base 20: mod_base = OTHER; note = 2'-O-methyl modified nucleotide
  modified_base 21: mod_base = OTHER; note = 2'-fluoro modified nucleotide
  modified_base 22: mod_base = OTHER; note = 2'-O-methyl modified nucleotide
  modified_base 23: mod_base = OTHER; note = 2'-fluoro modified nucleotide
  modified_base 24: mod_base = OTHER; note = 2'-O-methyl modified nucleotide
  modified_base 25: mod_base = OTHER; note = 2'-fluoro modified nucleotide
  modified_base 26: mod_base = OTHER; note = 2'-O-methyl modified nucleotide
  modified_base 27: mod_base = OTHER; note = 2'-fluoro modified nucleotide
  modified_base 28: mod_base = OTHER; note = 2'-O-methyl modified nucleotide
  modified_base 29: mod_base = OTHER; note = 2'-fluoro modified nucleotide
  modified_base 30: mod_base = OTHER; note = 2'-O-methyl modified nucleotide
  modified_base 31: mod_base = OTHER; note = 2'-fluoro modified nucleotide with phosphorothioate linkage
  modified_base 32: mod_base = OTHER; note = 2'-O-methyl modified nucleotide with phosphorothioate linkage
  modified_base 33: mod_base = OTHER; note = 2'-fluoro trivalent N-acetylgalactosamine modified nucleotide
ngtgagttattttgtcaatcaaaataactcaca

SEQ ID NO: 2008 - RNA, 33 nt, synthetic construct
  source 1..33: mol_type = other RNA
  misc_difference 1: note = 2'-O-methyl modified nucleotide with phosphorothioate linkage may be 5' phosphate modified
  modified_base 2: mod_base = OTHER; note = 2'-fluoro modified nucleotide with phosphorothioate linkage
  modified_base 3: mod_base = OTHER; note = 2'-O-methyl modified nucleotide
  modified_base 4: mod_base = OTHER; note = 2'-fluoro modified nucleotide
  modified_base 5: mod_base = OTHER; note = 2'-O-methyl modified nucleotide
  modified_base 6: mod_base = OTHER; note = 2'-fluoro modified nucleotide
  modified_base 7: mod_base = OTHER; note = 2'-O-methyl modified nucleotide
  modified_base 8: mod_base = OTHER; note = 2'-fluoro modified nucleotide
  modified_base 9: mod_base = OTHER; note = 2'-O-methyl modified nucleotide
  modified_base 10: mod_base = OTHER; note = 2'-fluoro modified nucleotide
  modified_base 11: mod_base = OTHER; note = 2'-O-methyl modified nucleotide
  modified_base 12: mod_base = OTHER; note = 2'-fluoro modified nucleotide
  modified_base 13: mod_base = OTHER; note = 2'-O-methyl modified nucleotide
  modified_base 14: mod_base = OTHER; note = 2'-fluoro modified nucleotide with phosphorothioate linkage
  modified_base 15: mod_base = OTHER; note = 2'-O-methyl modified nucleotide with phosphorothioate linkage
  modified_base 16: mod_base = OTHER; note = 2'-fluoro modified nucleotide with phosphorothioate linkage
  modified_base 17: mod_base = OTHER; note = 2'-O-methyl modified nucleotide with phosphorothioate linkage
  modified_base 18: mod_base = OTHER; note = 2'-fluoro modified nucleotide with phosphorothioate linkage
  modified_base 19: mod_base = OTHER; note = 2'-O-methyl modified nucleotide with phosphorothioate linkage
  modified_base 20: mod_base = OTHER; note = 2'-O-methyl modified nucleotide
  modified_base 21: mod_base = OTHER; note = 2'-fluoro modified nucleotide
  modified_base 22: mod_base = OTHER; note = 2'-O-methyl modified nucleotide
  modified_base 23: mod_base = OTHER; note = 2'-fluoro modified nucleotide
  modified_base 24: mod_base = OTHER; note = 2'-O-methyl modified nucleotide
  modified_base 25: mod_base = OTHER; note = 2'-fluoro modified nucleotide
  modified_base 26: mod_base = OTHER; note = 2'-O-methyl modified nucleotide
  modified_base 27: mod_base = OTHER; note = 2'-fluoro modified nucleotide
  modified_base 28: mod_base = OTHER; note = 2'-O-methyl modified nucleotide
  modified_base 29: mod_base = OTHER; note = 2'-fluoro modified nucleotide
  modified_base 30: mod_base = OTHER; note = 2'-O-methyl modified nucleotide
  modified_base 31: mod_base = OTHER; note = 2'-fluoro modified nucleotide with phosphorothioate linkage
  modified_base 32: mod_base = OTHER; note = 2'-O-methyl modified nucleotide with phosphorothioate linkage
  modified_base 33: mod_base = OTHER; note = 2'-fluoro trivalent N-acetylgalactosamine modified nucleotide
ntgagttattttgtcaataacaaaataactcaa

SEQ ID NO: 2009 - RNA, 33 nt, synthetic construct
  source 1..33: mol_type = other RNA
  misc_difference 1: note = 2'-O-methyl modified nucleotide with phosphorothioate linkage may be 5' phosphate modified
  modified_base 2: mod_base = OTHER; note = 2'-fluoro modified nucleotide with phosphorothioate linkage
  modified_base 3: mod_base = OTHER; note = 2'-O-methyl modified nucleotide
  modified_base 4: mod_base = OTHER; note = 2'-fluoro modified nucleotide
  modified_base 5: mod_base = OTHER; note = 2'-O-methyl modified nucleotide
  modified_base 6: mod_base = OTHER; note = 2'-fluoro modified nucleotide
  modified_base 7: mod_base = OTHER; note = 2'-O-methyl modified nucleotide
  modified_base 8: mod_base = OTHER; note = 2'-fluoro modified nucleotide
  modified_base 9: mod_base = OTHER; note = 2'-O-methyl modified nucleotide
  modified_base 10: mod_base = OTHER; note = 2'-fluoro modified nucleotide
  modified_base 11: mod_base = OTHER; note = 2'-O-methyl modified nucleotide
  modified_base 12: mod_base = OTHER; note = 2'-fluoro modified nucleotide
  modified_base 13: mod_base = OTHER; note = 2'-O-methyl modified nucleotide
  modified_base 14: mod_base = OTHER; note = 2'-fluoro modified nucleotide with phosphorothioate linkage
  modified_base 15: mod_base = OTHER; note = 2'-O-methyl modified nucleotide with phosphorothioate linkage
  modified_base 16: mod_base = OTHER; note = 2'-fluoro modified nucleotide with phosphorothioate linkage
  modified_base 17: mod_base = OTHER; note = 2'-O-methyl modified nucleotide with phosphorothioate linkage
  modified_base 18: mod_base = OTHER; note = 2'-fluoro modified nucleotide with phosphorothioate linkage
  modified_base 19: mod_base = OTHER; note = 2'-O-methyl modified nucleotide with phosphorothioate linkage
  modified_base 20: mod_base = OTHER; note = 2'-O-methyl modified nucleotide
  modified_base 21: mod_base = OTHER; note = 2'-fluoro modified nucleotide
  modified_base 22: mod_base = OTHER; note = 2'-O-methyl modified nucleotide
  modified_base 23: mod_base = OTHER; note = 2'-fluoro modified nucleotide
  modified_base 24: mod_base = OTHER; note = 2'-O-methyl modified nucleotide
  modified_base 25: mod_base = OTHER; note = 2'-fluoro modified nucleotide
  modified_base 26: mod_base = OTHER; note = 2'-O-methyl modified nucleotide
  modified_base 27: mod_base = OTHER; note = 2'-fluoro modified nucleotide
  modified_base 28: mod_base = OTHER; note = 2'-O-methyl modified nucleotide
  modified_base 29: mod_base = OTHER; note = 2'-fluoro modified nucleotide
  modified_base 30: mod_base = OTHER; note = 2'-O-methyl modified nucleotide
  modified_base 31: mod_base = OTHER; note = 2'-fluoro modified nucleotide with phosphorothioate linkage
  modified_base 32: mod_base = OTHER; note = 2'-O-methyl modified nucleotide with phosphorothioate linkage
  modified_base 33: mod_base = OTHER; note = 2'-fluoro trivalent N-acetylgalactosamine modified nucleotide
naattttccttgaaagatcttcaaggaaaatta

SEQ ID NO: 2010 - RNA, 33 nt, synthetic construct
  source 1..33: mol_type = other RNA
  misc_difference 1: note = 2'-O-methyl modified nucleotide with phosphorothioate linkage may be 5' phosphate modified
  modified_base 2: mod_base = OTHER; note = 2'-fluoro modified nucleotide with phosphorothioate linkage
  modified_base 3: mod_base = OTHER; note = 2'-O-methyl modified nucleotide
  modified_base 4: mod_base = OTHER; note = 2'-fluoro modified nucleotide
  modified_base 5: mod_base = OTHER; note = 2'-O-methyl modified nucleotide
  modified_base 6: mod_base = OTHER; note = 2'-fluoro modified nucleotide
  modified_base 7: mod_base = OTHER; note = 2'-O-methyl modified nucleotide
  modified_base 8: mod_base = OTHER; note = 2'-fluoro modified nucleotide
  modified_base 9: mod_base = OTHER; note = 2'-O-methyl modified nucleotide
  modified_base 10: mod_base = OTHER; note = 2'-fluoro modified nucleotide
  modified_base 11: mod_base = OTHER; note = 2'-O-methyl modified nucleotide
  modified_base 12: mod_base = OTHER; note = 2'-fluoro modified nucleotide
  modified_base 13: mod_base = OTHER; note = 2'-O-methyl modified nucleotide
  modified_base 14: mod_base = OTHER; note = 2'-fluoro modified nucleotide with phosphorothioate linkage
  modified_base 15: mod_base = OTHER; note = 2'-O-methyl modified nucleotide with phosphorothioate linkage
  modified_base 16: mod_base = OTHER; note = 2'-fluoro modified nucleotide with phosphorothioate linkage
  modified_base 17: mod_base = OTHER; note = 2'-O-methyl modified nucleotide with phosphorothioate linkage
  modified_base 18: mod_base = OTHER; note = 2'-fluoro modified nucleotide with phosphorothioate linkage
  modified_base 19: mod_base = OTHER; note = 2'-O-methyl modified nucleotide with phosphorothioate linkage
  modified_base 20: mod_base = OTHER; note = 2'-O-methyl modified nucleotide
  modified_base 21: mod_base = OTHER; note = 2'-fluoro modified nucleotide
  modified_base 22: mod_base = OTHER; note = 2'-O-methyl modified nucleotide
  modified_base 23: mod_base = OTHER; note = 2'-fluoro modified nucleotide
  modified_base 24: mod_base = OTHER; note = 2'-O-methyl modified nucleotide
  modified_base 25: mod_base = OTHER; note = 2'-fluoro modified nucleotide
  modified_base 26: mod_base = OTHER; note = 2'-O-methyl modified nucleotide
  modified_base 27: mod_base = OTHER; note = 2'-fluoro modified nucleotide
  modified_base 28: mod_base = OTHER; note = 2'-O-methyl modified nucleotide
  modified_base 29: mod_base = OTHER; note = 2'-fluoro modified nucleotide
  modified_base 30: mod_base = OTHER; note = 2'-O-methyl modified nucleotide
  modified_base 31: mod_base = OTHER; note = 2'-fluoro modified nucleotide with phosphorothioate linkage
  modified_base 32: mod_base = OTHER; note = 2'-O-methyl modified nucleotide with phosphorothioate linkage
  modified_base 33: mod_base = OTHER; note = 2'-fluoro trivalent N-acetylgalactosamine modified nucleotide
nctgttacagcaatataaaattgctgtaacaga

SEQ ID NO: 2011 - RNA, 33 nt, synthetic construct
  source 1..33: mol_type = other RNA
  misc_difference 1: note = 2'-O-methyl modified nucleotide with phosphorothioate linkage may be 5' phosphate modified
  modified_base 2: mod_base = OTHER; note = 2'-fluoro modified nucleotide with phosphorothioate linkage
  modified_base 3: mod_base = OTHER; note = 2'-O-methyl modified nucleotide
  modified_base 4: mod_base = OTHER; note = 2'-fluoro modified nucleotide
  modified_base 5: mod_base = OTHER; note = 2'-O-methyl modified nucleotide
  modified_base 6: mod_base = OTHER; note = 2'-fluoro modified nucleotide
  modified_base 7: mod_base = OTHER; note = 2'-O-methyl modified nucleotide
  modified_base 8: mod_base = OTHER; note = 2'-fluoro modified nucleotide
  modified_base 9: mod_base = OTHER; note = 2'-O-methyl modified nucleotide
  modified_base 10: mod_base = OTHER; note = 2'-fluoro modified nucleotide
  modified_base 11: mod_base = OTHER; note = 2'-O-methyl modified nucleotide
  modified_base 12: mod_base = OTHER; note = 2'-fluoro modified nucleotide
  modified_base 13: mod_base = OTHER; note = 2'-O-methyl modified nucleotide
  modified_base 14: mod_base = OTHER; note = 2'-fluoro modified nucleotide with phosphorothioate linkage
  modified_base 15: mod_base = OTHER; note = 2'-O-methyl modified nucleotide with phosphorothioate linkage
  modified_base 16: mod_base = OTHER; note = 2'-fluoro modified nucleotide with phosphorothioate linkage
  modified_base 17: mod_base = OTHER; note = 2'-O-methyl modified nucleotide with phosphorothioate linkage
  modified_base 18: mod_base = OTHER; note = 2'-fluoro modified nucleotide with phosphorothioate linkage
  modified_base 19: mod_base = OTHER; note = 2'-O-methyl modified nucleotide with phosphorothioate linkage
  modified_base 20: mod_base = OTHER; note = 2'-O-methyl modified nucleotide
  modified_base 21: mod_base = OTHER; note = 2'-fluoro modified nucleotide
  modified_base 22: mod_base = OTHER; note = 2'-O-methyl modified nucleotide
  modified_base 23: mod_base = OTHER; note = 2'-fluoro modified nucleotide
  modified_base 24: mod_base = OTHER; note = 2'-O-methyl modified nucleotide
  modified_base 25: mod_base = OTHER; note = 2'-fluoro modified nucleotide
  modified_base 26: mod_base = OTHER; note = 2'-O-methyl modified nucleotide
  modified_base 27: mod_base = OTHER; note = 2'-fluoro modified nucleotide
  modified_base 28: mod_base = OTHER; note = 2'-O-methyl modified nucleotide
  modified_base 29: mod_base = OTHER; note = 2'-fluoro modified nucleotide
  modified_base 30: mod_base = OTHER; note = 2'-O-methyl modified nucleotide
  modified_base 31: mod_base = OTHER; note = 2'-fluoro modified nucleotide with phosphorothioate linkage
  modified_base 32: mod_base = OTHER; note = 2'-O-methyl modified nucleotide with phosphorothioate linkage
  modified_base 33: mod_base = OTHER; note = 2'-fluoro trivalent N-acetylgalactosamine modified nucleotide
naatccattgtcataggttatgacaatggatta

SEQ ID NO: 2012 - RNA, 33 nt, synthetic construct
  source 1..33: mol_type = other RNA
  misc_difference 1: note = 2'-O-methyl modified nucleotide with phosphorothioate linkage may be 5' phosphate modified
  modified_base 2: mod_base = OTHER; note = 2'-fluoro modified nucleotide with phosphorothioate linkage
  modified_base 3: mod_base = OTHER; note = 2'-O-methyl modified nucleotide
  modified_base 4: mod_base = OTHER; note = 2'-fluoro modified nucleotide
  modified_base 5: mod_base = OTHER; note = 2'-O-methyl modified nucleotide
  modified_base 6: mod_base = OTHER; note = 2'-fluoro modified nucleotide
  modified_base 7: mod_base = OTHER; note = 2'-O-methyl modified nucleotide
  modified_base 8: mod_base = OTHER; note = 2'-fluoro modified nucleotide
  modified_base 9: mod_base = OTHER; note = 2'-O-methyl modified nucleotide
  modified_base 10: mod_base = OTHER; note = 2'-fluoro modified nucleotide
  modified_base 11: mod_base = OTHER; note = 2'-O-methyl modified nucleotide
  modified_base 12: mod_base = OTHER; note = 2'-fluoro modified nucleotide
  modified_base 13: mod_base = OTHER; note = 2'-O-methyl modified nucleotide
  modified_base 14: mod_base = OTHER; note = 2'-fluoro modified nucleotide with phosphorothioate linkage
  modified_base 15: mod_base = OTHER; note = 2'-O-methyl modified nucleotide with phosphorothioate linkage
  modified_base 16: mod_base = OTHER; note = 2'-fluoro modified nucleotide with phosphorothioate linkage
  modified_base 17: mod_base = OTHER; note = 2'-O-methyl modified nucleotide with phosphorothioate linkage
  modified_base 18: mod_base = OTHER; note = 2'-fluoro modified nucleotide with phosphorothioate linkage
  modified_base 19: mod_base = OTHER; note = 2'-O-methyl modified nucleotide with phosphorothioate linkage
  modified_base 20: mod_base = OTHER; note = 2'-O-methyl modified nucleotide
  modified_base 21: mod_base = OTHER; note = 2'-fluoro modified nucleotide
  modified_base 22: mod_base = OTHER; note = 2'-O-methyl modified nucleotide
  modified_base 23: mod_base = OTHER; note = 2'-fluoro modified nucleotide
  modified_base 24: mod_base = OTHER; note = 2'-O-methyl modified nucleotide
  modified_base 25: mod_base = OTHER; note = 2'-fluoro modified nucleotide
  modified_base 26: mod_base = OTHER; note = 2'-O-methyl modified nucleotide
  modified_base 27: mod_base = OTHER; note = 2'-fluoro modified nucleotide
  modified_base 28: mod_base = OTHER; note = 2'-O-methyl modified nucleotide
  modified_base 29: mod_base = OTHER; note = 2'-fluoro modified nucleotide
  modified_base 30: mod_base = OTHER; note = 2'-O-methyl modified nucleotide
  modified_base 31: mod_base = OTHER; note = 2'-fluoro modified nucleotide with phosphorothioate linkage
  modified_base 32: mod_base = OTHER; note = 2'-O-methyl modified nucleotide with phosphorothioate linkage
  modified_base 33: mod_base = OTHER; note = 2'-fluoro trivalent N-acetylgalactosamine modified nucleotide
natccattgtcataggttatatgacaatggata

SEQ ID NO: 2013 - RNA, 33 nt, synthetic construct
  source 1..33: mol_type = other RNA
  misc_difference 1: note = 2'-O-methyl modified nucleotide with phosphorothioate linkage may be 5' phosphate modified
  modified_base 2: mod_base = OTHER; note = 2'-fluoro modified nucleotide with phosphorothioate linkage
  modified_base 3: mod_base = OTHER; note = 2'-O-methyl modified nucleotide
  modified_base 4: mod_base = OTHER; note = 2'-fluoro modified nucleotide
  modified_base 5: mod_base = OTHER; note = 2'-O-methyl modified nucleotide
  modified_base 6: mod_base = OTHER; note = 2'-fluoro modified nucleotide
  modified_base 7: mod_base = OTHER; note = 2'-O-methyl modified nucleotide
  modified_base 8: mod_base = OTHER; note = 2'-fluoro modified nucleotide
  modified_base 9: mod_base = OTHER; note = 2'-O-methyl modified nucleotide
  modified_base 10: mod_base = OTHER; note = 2'-fluoro modified nucleotide
  modified_base 11: mod_base = OTHER; note = 2'-O-methyl modified nucleotide
  modified_base 12: mod_base = OTHER; note = 2'-fluoro modified nucleotide
  modified_base 13: mod_base = OTHER; note = 2'-O-methyl modified nucleotide
  modified_base 14: mod_base = OTHER; note = 2'-fluoro modified nucleotide with phosphorothioate linkage
  modified_base 15: mod_base = OTHER; note = 2'-O-methyl modified nucleotide with phosphorothioate linkage
  modified_base 16: mod_base = OTHER; note = 2'-fluoro modified nucleotide with phosphorothioate linkage
  modified_base 17: mod_base = OTHER; note = 2'-O-methyl modified nucleotide with phosphorothioate linkage
  modified_base 18: mod_base = OTHER; note = 2'-fluoro modified nucleotide with phosphorothioate linkage
  modified_base 19: mod_base = OTHER; note = 2'-O-methyl modified nucleotide with phosphorothioate linkage
  modified_base 20: mod_base = OTHER; note = 2'-O-methyl modified nucleotide
  modified_base 21: mod_base = OTHER; note = 2'-fluoro modified nucleotide
  modified_base 22: mod_base = OTHER; note = 2'-O-methyl modified nucleotide
  modified_base 23: mod_base = OTHER; note = 2'-fluoro modified nucleotide
  modified_base 24: mod_base = OTHER; note = 2'-O-methyl modified nucleotide
  modified_base 25: mod_base = OTHER; note = 2'-fluoro modified nucleotide
  modified_base 26: mod_base = OTHER; note = 2'-O-methyl modified nucleotide
  modified_base 27: mod_base = OTHER; note = 2'-fluoro modified nucleotide
  modified_base 28: mod_base = OTHER; note = 2'-O-methyl modified nucleotide
  modified_base 29: mod_base = OTHER; note = 2'-fluoro modified nucleotide
  modified_base 30: mod_base = OTHER; note = 2'-O-methyl modified nucleotide
  modified_base 31: mod_base = OTHER; note = 2'-fluoro modified nucleotide with phosphorothioate linkage
  modified_base 32: mod_base = OTHER; note = 2'-O-methyl modified nucleotide with phosphorothioate linkage
  modified_base 33: mod_base = OTHER; note = 2'-fluoro trivalent N-acetylgalactosamine modified nucleotide
nagaaatccattgtcatagacaatggatttcta

SEQ ID NO: 2014 - RNA, 33 nt, synthetic construct
  source 1..33: mol_type = other RNA
  misc_difference 1: note = 2'-O-methyl modified nucleotide with phosphorothioate linkage may be 5' phosphate modified
  modified_base 2: mod_base = OTHER; note = 2'-fluoro modified nucleotide with phosphorothioate linkage
  modified_base 3: mod_base = OTHER; note = 2'-O-methyl modified nucleotide
  modified_base 4: mod_base = OTHER; note = 2'-fluoro modified nucleotide
  modified_base 5: mod_base = OTHER; note = 2'-O-methyl modified nucleotide
  modified_base 6: mod_base = OTHER; note = 2'-fluoro modified nucleotide
  modified_base 7: mod_base = OTHER; note = 2'-O-methyl modified nucleotide
  modified_base 8: mod_base = OTHER; note = 2'-fluoro modified nucleotide
  modified_base 9: mod_base = OTHER; note = 2'-O-methyl modified nucleotide
  modified_base 10: mod_base = OTHER; note = 2'-fluoro modified nucleotide
  modified_base 11: mod_base = OTHER; note = 2'-O-methyl modified nucleotide
  modified_base 12: mod_base = OTHER; note = 2'-fluoro modified nucleotide
  modified_base 13: mod_base = OTHER; note = 2'-O-methyl modified nucleotide
  modified_base 14: mod_base = OTHER; note = 2'-fluoro modified nucleotide with phosphorothioate linkage
  modified_base 15: mod_base = OTHER; note = 2'-O-methyl modified nucleotide with phosphorothioate linkage
  modified_base 16: mod_base = OTHER; note = 2'-fluoro modified nucleotide with phosphorothioate linkage
  modified_base 17: mod_base = OTHER; note = 2'-O-methyl modified nucleotide with phosphorothioate linkage
  modified_base 18: mod_base = OTHER; note = 2'-fluoro modified nucleotide with phosphorothioate linkage
  modified_base 19: mod_base = OTHER; note = 2'-O-methyl modified nucleotide with phosphorothioate linkage
  modified_base 20: mod_base = OTHER; note = 2'-O-methyl modified nucleotide
  modified_base 21: mod_base = OTHER; note = 2'-fluoro modified nucleotide
  modified_base 22: mod_base = OTHER; note = 2'-O-methyl modified nucleotide
  modified_base 23: mod_base = OTHER; note = 2'-fluoro modified nucleotide
  modified_base 24: mod_base = OTHER; note = 2'-O-methyl modified nucleotide
  modified_base 25: mod_base = OTHER; note = 2'-fluoro modified nucleotide
  modified_base 26: mod_base = OTHER; note = 2'-O-methyl modified nucleotide
  modified_base 27: mod_base = OTHER; note = 2'-fluoro modified nucleotide
  modified_base 28: mod_base = OTHER; note = 2'-O-methyl modified nucleotide
  modified_base 29: mod_base = OTHER; note = 2'-fluoro modified nucleotide
  modified_base 30: mod_base = OTHER; note = 2'-O-methyl modified nucleotide
  modified_base 31: mod_base = OTHER; note = 2'-fluoro modified nucleotide with phosphorothioate linkage
  modified_base 32: mod_base = OTHER; note = 2'-O-methyl modified nucleotide with phosphorothioate linkage
  modified_base 33: mod_base = OTHER; note = 2'-fluoro trivalent N-acetylgalactosamine modified nucleotide
nagacatattctttaacttaaagaatatgtcta

SEQ ID NO: 2015 - RNA, 33 nt, synthetic construct
  source 1..33: mol_type = other RNA
  misc_difference 1: note = 2'-O-methyl modified nucleotide with phosphorothioate linkage may be 5' phosphate modified
  modified_base 2: mod_base = OTHER; note = 2'-fluoro modified nucleotide with phosphorothioate linkage
  modified_base 3: mod_base = OTHER; note = 2'-O-methyl modified nucleotide
  modified_base 4: mod_base = OTHER; note = 2'-fluoro modified nucleotide
  modified_base 5: mod_base = OTHER; note = 2'-O-methyl modified nucleotide
  modified_base 6: mod_base = OTHER; note = 2'-fluoro modified nucleotide
  modified_base 7: mod_base = OTHER; note = 2'-O-methyl modified nucleotide
  modified_base 8: mod_base = OTHER; note = 2'-fluoro modified nucleotide
  modified_base 9: mod_base = OTHER; note = 2'-O-methyl modified nucleotide
  modified_base 10: mod_base = OTHER; note = 2'-fluoro modified nucleotide
  modified_base 11: mod_base = OTHER; note = 2'-O-methyl modified nucleotide
  modified_base 12: mod_base = OTHER; note = 2'-fluoro modified nucleotide
  modified_base 13: mod_base = OTHER; note = 2'-O-methyl modified nucleotide
  modified_base 14: mod_base = OTHER; note = 2'-fluoro modified nucleotide with phosphorothioate linkage
  modified_base 15: mod_base = OTHER; note = 2'-O-methyl modified nucleotide with phosphorothioate linkage
  modified_base 16: mod_base = OTHER; note = 2'-fluoro modified nucleotide with phosphorothioate linkage
  modified_base 17: mod_base = OTHER; note = 2'-O-methyl modified nucleotide with phosphorothioate linkage
  modified_base 18: mod_base = OTHER; note = 2'-fluoro modified nucleotide with phosphorothioate linkage
  modified_base 19: mod_base = OTHER; note = 2'-O-methyl modified nucleotide with phosphorothioate linkage
  modified_base 20: mod_base = OTHER; note = 2'-O-methyl modified nucleotide
  modified_base 21: mod_base = OTHER; note = 2'-fluoro modified nucleotide
  modified_base 22: mod_base = OTHER; note = 2'-O-methyl modified nucleotide
  modified_base 23: mod_base = OTHER; note = 2'-fluoro modified nucleotide
  modified_base 24: mod_base = OTHER; note = 2'-O-methyl modified nucleotide
  modified_base 25: mod_base = OTHER; note = 2'-fluoro modified nucleotide
  modified_base 26: mod_base = OTHER; note = 2'-O-methyl modified nucleotide
  modified_base 27: mod_base = OTHER; note = 2'-fluoro modified nucleotide
  modified_base 28: mod_base = OTHER; note = 2'-O-methyl modified nucleotide
  modified_base 29: mod_base = OTHER; note = 2'-fluoro modified nucleotide
  modified_base 30: mod_base = OTHER; note = 2'-O-methyl modified nucleotide
  modified_base 31: mod_base = OTHER; note = 2'-fluoro modified nucleotide with phosphorothioate linkage
  modified_base 32: mod_base = OTHER; note = 2'-O-methyl modified nucleotide with phosphorothioate linkage
  modified_base 33: mod_base = OTHER; note = 2'-fluoro trivalent N-acetylgalactosamine modified nucleotide
nagtgcagattccctccacgggaatctgcacta

SEQ ID NO: 2016 - RNA, 33 nt, synthetic construct
  source 1..33: mol_type = other RNA
  misc_difference 1: note = 2'-O-methyl modified nucleotide with phosphorothioate linkage may be 5' phosphate modified
  modified_base 2: mod_base = OTHER; note = 2'-fluoro modified nucleotide with phosphorothioate linkage
  modified_base 3: mod_base = OTHER; note = 2'-O-methyl modified nucleotide
  modified_base 4: mod_base = OTHER; note = 2'-fluoro modified nucleotide
  modified_base 5: mod_base = OTHER; note = 2'-O-methyl modified nucleotide
  modified_base 6: mod_base = OTHER; note = 2'-fluoro modified nucleotide
  modified_base 7: mod_base = OTHER; note = 2'-O-methyl modified nucleotide
  modified_base 8: mod_base = OTHER; note = 2'-fluoro modified nucleotide
  modified_base 9: mod_base = OTHER; note = 2'-O-methyl modified nucleotide
  modified_base 10: mod_base = OTHER; note = 2'-fluoro modified nucleotide
  modified_base 11: mod_base = OTHER; note = 2'-O-methyl modified nucleotide
  modified_base 12: mod_base = OTHER; note = 2'-fluoro modified nucleotide
  modified_base 13: mod_base = OTHER; note = 2'-O-methyl modified nucleotide
  modified_base 14: mod_base = OTHER; note = 2'-fluoro modified nucleotide with phosphorothioate linkage
  modified_base 15: mod_base = OTHER; note = 2'-O-methyl modified nucleotide with phosphorothioate linkage
  modified_base 16: mod_base = OTHER; note = 2'-fluoro modified nucleotide with phosphorothioate linkage
  modified_base 17: mod_base = OTHER; note = 2'-O-methyl modified nucleotide with phosphorothioate linkage
  modified_base 18: mod_base = OTHER; note = 2'-fluoro modified nucleotide with phosphorothioate linkage
  modified_base 19: mod_base = OTHER; note = 2'-O-methyl modified nucleotide with phosphorothioate linkage
  modified_base 20: mod_base = OTHER; note = 2'-O-methyl modified nucleotide
  modified_base 21: mod_base = OTHER; note = 2'-fluoro modified nucleotide
  modified_base 22: mod_base = OTHER; note = 2'-O-methyl modified nucleotide
  modified_base 23: mod_base = OTHER; note = 2'-fluoro modified nucleotide
  modified_base 24: mod_base = OTHER; note = 2'-O-methyl modified nucleotide
  modified_base 25: mod_base = OTHER; note = 2'-fluoro modified nucleotide
  modified_base 26: mod_base = OTHER; note = 2'-O-methyl modified nucleotide
  modified_base 27: mod_base = OTHER; note = 2'-fluoro modified nucleotide
  modified_base 28: mod_base = OTHER; note = 2'-O-methyl modified nucleotide
  modified_base 29: mod_base = OTHER; note = 2'-fluoro modified nucleotide
  modified_base 30: mod_base = OTHER; note = 2'-O-methyl modified nucleotide
  modified_base 31: mod_base = OTHER; note = 2'-fluoro modified nucleotide with phosphorothioate linkage
  modified_base 32: mod_base = OTHER; note = 2'-O-methyl modified nucleotide with phosphorothioate linkage
  modified_base 33: mod_base = OTHER; note = 2'-fluoro trivalent N-acetylgalactosamine modified nucleotide
ntccattgtcataggttatctatgacaatggaa

SEQ ID NO: 2017 - RNA, 33 nt, synthetic construct
  source 1..33: mol_type = other RNA
  misc_difference 1: note = 2'-O-methyl modified nucleotide with phosphorothioate linkage may be 5' phosphate modified
  modified_base 2: mod_base = OTHER; note = 2'-fluoro modified nucleotide with phosphorothioate linkage
  modified_base 3: mod_base = OTHER; note = 2'-O-methyl modified nucleotide
  modified_base 4: mod_base = OTHER; note = 2'-fluoro modified nucleotide
  modified_base 5: mod_base = OTHER; note = 2'-O-methyl modified nucleotide
  modified_base 6: mod_base = OTHER; note = 2'-fluoro modified nucleotide
  modified_base 7: mod_base = OTHER; note = 2'-O-methyl modified nucleotide
  modified_base 8: mod_base = OTHER; note = 2'-fluoro modified nucleotide
  modified_base 9: mod_base = OTHER; note = 2'-O-methyl modified nucleotide
  modified_base 10: mod_base = OTHER; note = 2'-fluoro modified nucleotide
  modified_base 11: mod_base = OTHER; note = 2'-O-methyl modified nucleotide
  modified_base 12: mod_base = OTHER; note = 2'-fluoro modified nucleotide
  modified_base 13: mod_base = OTHER; note = 2'-O-methyl modified nucleotide
  modified_base 14: mod_base = OTHER; note = 2'-fluoro modified nucleotide with phosphorothioate linkage
  modified_base 15: mod_base = OTHER; note = 2'-O-methyl modified nucleotide with phosphorothioate linkage
  modified_base 16: mod_base = OTHER; note = 2'-fluoro modified nucleotide with phosphorothioate linkage
  modified_base 17: mod_base = OTHER; note = 2'-O-methyl modified nucleotide with phosphorothioate linkage
  modified_base 18: mod_base = OTHER; note = 2'-fluoro modified nucleotide with phosphorothioate linkage
  modified_base 19: mod_base = OTHER; note = 2'-O-methyl modified nucleotide with phosphorothioate linkage
  modified_base 20: mod_base = OTHER; note = 2'-O-methyl modified nucleotide
  modified_base 21: mod_base = OTHER; note = 2'-fluoro modified nucleotide
  modified_base 22: mod_base = OTHER; note = 2'-O-methyl modified nucleotide
  modified_base 23: mod_base = OTHER; note = 2'-fluoro modified nucleotide
  modified_base 24: mod_base = OTHER; note = 2'-O-methyl modified nucleotide
  modified_base 25: mod_base = OTHER; note = 2'-fluoro modified nucleotide
  modified_base 26: mod_base = OTHER; note = 2'-O-methyl modified nucleotide
  modified_base 27: mod_base = OTHER; note = 2'-fluoro modified nucleotide
  modified_base 28: mod_base = OTHER; note = 2'-O-methyl modified nucleotide
  modified_base 29: mod_base = OTHER; note = 2'-fluoro modified nucleotide
  modified_base 30: mod_base = OTHER; note = 2'-O-methyl modified nucleotide
  modified_base 31: mod_base = OTHER; note = 2'-fluoro modified nucleotide with phosphorothioate linkage
  modified_base 32: mod_base = OTHER; note = 2'-O-methyl modified nucleotide with phosphorothioate linkage
  modified_base 33: mod_base = OTHER; note = 2'-fluoro trivalent N-acetylgalactosamine modified nucleotide
ngacatctttgaacaccttgttcaaagatgtca

SEQ ID NO: 2018 - RNA, 33 nt, synthetic construct
  source 1..33: mol_type = other RNA
  misc_difference 1: note = 2'-O-methyl modified nucleotide with phosphorothioate linkage may be 5' phosphate modified
  modified_base 2: mod_base = OTHER; note = 2'-fluoro modified nucleotide with phosphorothioate linkage
  modified_base 3: mod_base = OTHER; note = 2'-O-methyl modified nucleotide
  modified_base 4: mod_base = OTHER; note = 2'-fluoro modified nucleotide
  modified_base 5: mod_base = OTHER; note = 2'-O-methyl modified nucleotide
  modified_base 6: mod_base = OTHER; note = 2'-fluoro modified nucleotide
  modified_base 7: mod_base = OTHER; note = 2'-O-methyl modified nucleotide
  modified_base 8: mod_base = OTHER; note = 2'-fluoro modified nucleotide
  modified_base 9: mod_base = OTHER; note = 2'-O-methyl modified nucleotide
  modified_base 10: mod_base = OTHER; note = 2'-fluoro modified nucleotide
  modified_base 11: mod_base = OTHER; note = 2'-O-methyl modified nucleotide
  modified_base 12: mod_base = OTHER; note = 2'-fluoro modified nucleotide
  modified_base 13: mod_base = OTHER; note = 2'-O-methyl modified nucleotide
  modified_base 14: mod_base = OTHER; note = 2'-fluoro modified nucleotide with phosphorothioate linkage
  modified_base 15: mod_base = OTHER; note = 2'-O-methyl modified nucleotide with phosphorothioate linkage
  modified_base 16: mod_base = OTHER; note = 2'-fluoro modified nucleotide with phosphorothioate linkage
  modified_base 17: mod_base = OTHER; note = 2'-O-methyl modified nucleotide with phosphorothioate linkage
  modified_base 18: mod_base = OTHER; note = 2'-fluoro modified nucleotide with phosphorothioate linkage
  modified_base 19: mod_base = OTHER; note = 2'-O-methyl modified nucleotide with phosphorothioate linkage
  modified_base 20: mod_base = OTHER; note = 2'-O-methyl modified nucleotide
  modified_base 21: mod_base = OTHER; note = 2'-fluoro modified nucleotide
  modified_base 22: mod_base = OTHER; note = 2'-O-methyl modified nucleotide
  modified_base 23: mod_base = OTHER; note = 2'-fluoro modified nucleotide
  modified_base 24: mod_base = OTHER; note = 2'-O-methyl modified nucleotide
  modified_base 25: mod_base = OTHER; note = 2'-fluoro modified nucleotide
  modified_base 26: mod_base = OTHER; note = 2'-O-methyl modified nucleotide
  modified_base 27: mod_base = OTHER; note = 2'-fluoro modified nucleotide
  modified_base 28: mod_base = OTHER; note = 2'-O-methyl modified nucleotide
  modified_base 29: mod_base = OTHER; note = 2'-fluoro modified nucleotide
  modified_base 30: mod_base = OTHER; note = 2'-O-methyl modified nucleotide
  modified_base 31: mod_base = OTHER; note = 2'-fluoro modified nucleotide with phosphorothioate linkage
  modified_base 32: mod_base = OTHER; note = 2'-O-methyl modified nucleotide with phosphorothioate linkage
  modified_base 33: mod_base = OTHER; note = 2'-fluoro trivalent N-acetylgalactosamine modified nucleotide
ncattgtcataggttattgacctatgacaatga

SEQ ID NO: 2019 - RNA, 33 nt, synthetic construct
  source 1..33: mol_type = other RNA
  misc_difference 1: note = 2'-O-methyl modified nucleotide with phosphorothioate linkage may be 5' phosphate modified
  modified_base 2: mod_base = OTHER; note = 2'-fluoro modified nucleotide with phosphorothioate linkage
  modified_base 3: mod_base = OTHER; note = 2'-O-methyl modified nucleotide
  modified_base 4: mod_base = OTHER; note = 2'-fluoro modified nucleotide
  modified_base 5: mod_base = OTHER; note = 2'-O-methyl modified nucleotide
  modified_base 6: mod_base = OTHER; note = 2'-fluoro modified nucleotide
  modified_base 7: mod_base = OTHER; note = 2'-O-methyl modified nucleotide
  modified_base 8: mod_base = OTHER; note = 2'-fluoro modified nucleotide
  modified_base 9: mod_base = OTHER; note = 2'-O-methyl modified nucleotide
  modified_base 10: mod_base = OTHER; note = 2'-fluoro modified nucleotide
  modified_base 11: mod_base = OTHER; note = 2'-O-methyl modified nucleotide
  modified_base 12: mod_base = OTHER; note = 2'-fluoro modified nucleotide
  modified_base 13: mod_base = OTHER; note = 2'-O-methyl modified nucleotide
  modified_base 14: mod_base = OTHER; note = 2'-fluoro modified nucleotide with phosphorothioate linkage
  modified_base 15: mod_base = OTHER; note = 2'-O-methyl modified nucleotide with phosphorothioate linkage
  modified_base 16: mod_base = OTHER; note = 2'-fluoro modified nucleotide with phosphorothioate linkage
  modified_base 17: mod_base = OTHER; note = 2'-O-methyl modified nucleotide with phosphorothioate linkage
  modified_base 18: mod_base = OTHER; note = 2'-fluoro modified nucleotide with phosphorothioate linkage
  modified_base 19: mod_base = OTHER; note = 2'-O-methyl modified nucleotide with phosphorothioate linkage
  modified_base 20: mod_base = OTHER; note = 2'-O-methyl modified nucleotide
  modified_base 21: mod_base = OTHER; note = 2'-fluoro modified nucleotide
  modified_base 22: mod_base = OTHER; note = 2'-O-methyl modified nucleotide
  modified_base 23: mod_base = OTHER; note = 2'-fluoro modified nucleotide
  modified_base 24: mod_base = OTHER; note = 2'-O-methyl modified nucleotide
  modified_base 25: mod_base = OTHER; note = 2'-fluoro modified nucleotide
  modified_base 26: mod_base = OTHER; note = 2'-O-methyl modified nucleotide
  modified_base 27: mod_base = OTHER; note = 2'-fluoro modified nucleotide
  modified_base 28: mod_base = OTHER; note = 2'-O-methyl modified nucleotide
  modified_base 29: mod_base = OTHER; note = 2'-fluoro modified nucleotide
  modified_base 30: mod_base = OTHER; note = 2'-O-methyl modified nucleotide
  modified_base 31: mod_base = OTHER; note = 2'-fluoro modified nucleotide with phosphorothioate linkage
  modified_base 32: mod_base = OTHER; note = 2'-O-methyl modified nucleotide with phosphorothioate linkage
  modified_base 33: mod_base = OTHER; note = 2'-fluoro trivalent N-acetylgalactosamine modified nucleotide
ngaagagaaatccattgtctggatttctcttca

SEQ ID NO: 2020 - RNA, 33 nt, synthetic construct
  source 1..33: mol_type = other RNA
  misc_difference 1: note = 2'-O-methyl modified nucleotide with phosphorothioate linkage may be 5' phosphate modified
  modified_base 2: mod_base = OTHER; note = 2'-fluoro modified nucleotide with phosphorothioate linkage
  modified_base 3: mod_base = OTHER; note = 2'-O-methyl modified nucleotide
  modified_base 4: mod_base = OTHER; note = 2'-fluoro modified nucleotide
  modified_base 5: mod_base = OTHER; note = 2'-O-methyl modified nucleotide
  modified_base 6: mod_base = OTHER; note = 2'-fluoro modified nucleotide
  modified_base 7: mod_base = OTHER; note = 2'-O-methyl modified nucleotide
  modified_base 8: mod_base = OTHER; note = 2'-fluoro modified nucleotide
  modified_base 9: mod_base = OTHER; note = 2'-O-methyl modified nucleotide
  modified_base 10: mod_base = OTHER; note = 2'-fluoro modified nucleotide
  modified_base 11: mod_base = OTHER; note = 2'-O-methyl modified nucleotide
  modified_base 12: mod_base = OTHER; note = 2'-fluoro modified nucleotide
  modified_base 13: mod_base = OTHER; note = 2'-O-methyl modified nucleotide
  modified_base 14: mod_base = OTHER; note = 2'-fluoro modified nucleotide with phosphorothioate linkage
  modified_base 15: mod_base = OTHER; note = 2'-O-methyl modified nucleotide with phosphorothioate linkage
  modified_base 16: mod_base = OTHER; note = 2'-fluoro modified nucleotide with phosphorothioate linkage
  modified_base 17: mod_base = OTHER; note = 2'-O-methyl modified nucleotide with phosphorothioate linkage
  modified_base 18: mod_base = OTHER; note = 2'-fluoro modified nucleotide with phosphorothioate linkage
  modified_base 19: mod_base = OTHER; note = 2'-O-methyl modified nucleotide with phosphorothioate linkage
  modified_base 20: mod_base = OTHER; note = 2'-O-methyl modified nucleotide
  modified_base 21: mod_base = OTHER; note = 2'-fluoro modified nucleotide
  modified_base 22: mod_base = OTHER; note = 2'-O-methyl modified nucleotide
  modified_base 23: mod_base = OTHER; note = 2'-fluoro modified nucleotide
  modified_base 24: mod_base = OTHER; note = 2'-O-methyl modified nucleotide
  modified_base 25: mod_base = OTHER; note = 2'-fluoro modified nucleotide
  modified_base 26: mod_base = OTHER; note = 2'-O-methyl modified nucleotide
  modified_base 27: mod_base = OTHER; note = 2'-fluoro modified nucleotide
  modified_base 28: mod_base = OTHER; note = 2'-O-methyl modified nucleotide
  modified_base 29: mod_base = OTHER; note = 2'-fluoro modified nucleotide
  modified_base 30: mod_base = OTHER; note = 2'-O-methyl modified nucleotide
  modified_base 31: mod_base = OTHER; note = 2'-fluoro modified nucleotide with phosphorothioate linkage
  modified_base 32: mod_base = OTHER; note = 2'-O-methyl modified nucleotide with phosphorothioate linkage
  modified_base 33: mod_base = OTHER; note = 2'-fluoro trivalent N-acetylgalactosamine modified nucleotide
nacatattctttaacttcattaaagaatatgta

SEQ ID NO: 2021 - RNA, 33 nt, synthetic construct
  source 1..33: mol_type = other RNA
  misc_difference 1: note = 2'-O-methyl modified nucleotide with phosphorothioate linkage may be 5' phosphate modified
  modified_base 2: mod_base = OTHER; note = 2'-fluoro modified nucleotide with phosphorothioate linkage
  modified_base 3: mod_base = OTHER; note = 2'-O-methyl modified nucleotide
  modified_base 4: mod_base = OTHER; note = 2'-fluoro modified nucleotide
  modified_base 5: mod_base = OTHER; note = 2'-O-methyl modified nucleotide
  modified_base 6: mod_base = OTHER; note = 2'-fluoro modified nucleotide
  modified_base 7: mod_base = OTHER; note = 2'-O-methyl modified nucleotide
  modified_base 8: mod_base = OTHER; note = 2'-fluoro modified nucleotide
  modified_base 9: mod_base = OTHER; note = 2'-O-methyl modified nucleotide
  modified_base 10: mod_base = OTHER; note = 2'-fluoro modified nucleotide
  modified_base 11: mod_base = OTHER; note = 2'-O-methyl modified nucleotide
  modified_base 12: mod_base = OTHER; note = 2'-fluoro modified nucleotide
  modified_base 13: mod_base = OTHER; note = 2'-O-methyl modified nucleotide
  modified_base 14: mod_base = OTHER; note = 2'-fluoro modified nucleotide with phosphorothioate linkage
  modified_base 15: mod_base = OTHER; note = 2'-O-methyl modified nucleotide with phosphorothioate linkage
  modified_base 16: mod_base = OTHER; note = 2'-fluoro modified nucleotide with phosphorothioate linkage
  modified_base 17: mod_base = OTHER; note = 2'-O-methyl modified nucleotide with phosphorothioate linkage
  modified_base 18: mod_base = OTHER; note = 2'-fluoro modified nucleotide with phosphorothioate linkage
  modified_base 19: mod_base = OTHER; note = 2'-O-methyl modified nucleotide with phosphorothioate linkage
  modified_base 20: mod_base = OTHER; note = 2'-O-methyl modified nucleotide
  modified_base 21: mod_base = OTHER; note = 2'-fluoro modified nucleotide
  modified_base 22: mod_base = OTHER; note = 2'-O-methyl modified nucleotide
  modified_base 23: mod_base = OTHER; note = 2'-fluoro modified nucleotide
  modified_base 24: mod_base = OTHER; note = 2'-O-methyl modified nucleotide
  modified_base 25: mod_base = OTHER; note = 2'-fluoro modified nucleotide
  modified_base 26: mod_base = OTHER; note = 2'-O-methyl modified nucleotide
  modified_base 27: mod_base = OTHER; note = 2'-fluoro modified nucleotide
  modified_base 28: mod_base = OTHER; note = 2'-O-methyl modified nucleotide
  modified_base 29: mod_base = OTHER; note = 2'-fluoro modified nucleotide
  modified_base 30: mod_base = OTHER; note = 2'-O-methyl modified nucleotide
  modified_base 31: mod_base = OTHER; note = 2'-fluoro modified nucleotide with phosphorothioate linkage
  modified_base 32: mod_base = OTHER; note = 2'-O-methyl modified nucleotide with phosphorothioate linkage
  modified_base 33: mod_base = OTHER; note = 2'-fluoro trivalent N-acetylgalactosamine modified nucleotide
nagtccttttacactcaaagtgtaaaaggacta

SEQ ID NO: 2022 - RNA, 33 nt, synthetic construct
  source 1..33: mol_type = other RNA
  misc_difference 1: note = 2'-O-methyl modified nucleotide with phosphorothioate linkage may be 5' phosphate modified
  modified_base 2: mod_base = OTHER; note = 2'-fluoro modified nucleotide with phosphorothioate linkage
  modified_base 3: mod_base = OTHER; note = 2'-O-methyl modified nucleotide
  modified_base 4: mod_base = OTHER; note = 2'-fluoro modified nucleotide
  modified_base 5: mod_base = OTHER; note = 2'-O-methyl modified nucleotide
  modified_base 6: mod_base = OTHER; note = 2'-fluoro modified nucleotide
  modified_base 7: mod_base = OTHER; note = 2'-O-methyl modified nucleotide
  modified_base 8: mod_base = OTHER; note = 2'-fluoro modified nucleotide
  modified_base 9: mod_base = OTHER; note = 2'-O-methyl modified nucleotide
  modified_base 10: mod_base = OTHER; note = 2'-fluoro modified nucleotide
  modified_base 11: mod_base = OTHER; note = 2'-O-methyl modified nucleotide
  modified_base 12: mod_base = OTHER; note = 2'-fluoro modified nucleotide
  modified_base 13: mod_base = OTHER; note = 2'-O-methyl modified nucleotide
  modified_base 14: mod_base = OTHER; note = 2'-fluoro modified nucleotide with phosphorothioate linkage
  modified_base 15: mod_base = OTHER; note = 2'-O-methyl modified nucleotide with phosphorothioate linkage
  modified_base 16: mod_base = OTHER; note = 2'-fluoro modified nucleotide with phosphorothioate linkage
  modified_base 17: mod_base = OTHER; note = 2'-O-methyl modified nucleotide with phosphorothioate linkage
  modified_base 18: mod_base = OTHER; note = 2'-fluoro modified nucleotide with phosphorothioate linkage
  modified_base 19: mod_base = OTHER; note = 2'-O-methyl modified nucleotide with phosphorothioate linkage
  modified_base 20: mod_base = OTHER; note = 2'-O-methyl modified nucleotide
  modified_base 21: mod_base = OTHER; note = 2'-fluoro modified nucleotide
  modified_base 22: mod_base = OTHER; note = 2'-O-methyl modified nucleotide
  modified_base 23: mod_base = OTHER; note = 2'-fluoro modified nucleotide
  modified_base 24: mod_base = OTHER; note = 2'-O-methyl modified nucleotide
  modified_base 25: mod_base = OTHER; note = 2'-fluoro modified nucleotide
  modified_base 26: mod_base = OTHER; note = 2'-O-methyl modified nucleotide
  modified_base 27: mod_base = OTHER; note = 2'-fluoro modified nucleotide
  modified_base 28: mod_base = OTHER; note = 2'-O-methyl modified nucleotide
  modified_base 29: mod_base = OTHER; note = 2'-fluoro modified nucleotide
  modified_base 30: mod_base = OTHER; note = 2'-O-methyl modified nucleotide
  modified_base 31: mod_base = OTHER; note = 2'-fluoro modified nucleotide with phosphorothioate linkage
  modified_base 32: mod_base = OTHER; note = 2'-O-methyl modified nucleotide with phosphorothioate linkage
  modified_base 33: mod_base = OTHER; note = 2'-fluoro trivalent N-acetylgalactosamine modified nucleotide
nattttccttgaaagatcctttcaaggaaaata

SEQ ID NO: 2023 - RNA, 33 nt, synthetic construct
  source 1..33: mol_type = other RNA
  misc_difference 1: note = 2'-O-methyl modified nucleotide with phosphorothioate linkage may be 5' phosphate modified
  modified_base 2: mod_base = OTHER; note = 2'-fluoro modified nucleotide with phosphorothioate linkage
  modified_base 3: mod_base = OTHER; note = 2'-O-methyl modified nucleotide
  modified_base 4: mod_base = OTHER; note = 2'-fluoro modified nucleotide
  modified_base 5: mod_base = OTHER; note = 2'-O-methyl modified nucleotide
  modified_base 6: mod_base = OTHER; note = 2'-fluoro modified nucleotide
  modified_base 7: mod_base = OTHER; note = 2'-O-methyl modified nucleotide
  modified_base 8: mod_base = OTHER; note = 2'-fluoro modified nucleotide
  modified_base 9: mod_base = OTHER; note = 2'-O-methyl modified nucleotide
  modified_base 10: mod_base = OTHER; note = 2'-fluoro modified nucleotide
  modified_base 11: mod_base = OTHER; note = 2'-O-methyl modified nucleotide
  modified_base 12: mod_base = OTHER; note = 2'-fluoro modified nucleotide
  modified_base 13: mod_base = OTHER; note = 2'-O-methyl modified nucleotide
  modified_base 14: mod_base = OTHER; note = 2'-fluoro modified nucleotide with phosphorothioate linkage
  modified_base 15: mod_base = OTHER; note = 2'-O-methyl modified nucleotide with phosphorothioate linkage
  modified_base 16: mod_base = OTHER; note = 2'-fluoro modified nucleotide with phosphorothioate linkage
  modified_base 17: mod_base = OTHER; note = 2'-O-methyl modified nucleotide with phosphorothioate linkage
  modified_base 18: mod_base = OTHER; note = 2'-fluoro modified nucleotide with phosphorothioate linkage
  modified_base 19: mod_base = OTHER; note = 2'-O-methyl modified nucleotide with phosphorothioate linkage
  modified_base 20: mod_base = OTHER; note = 2'-O-methyl modified nucleotide
  modified_base 21: mod_base = OTHER; note = 2'-fluoro modified nucleotide
  modified_base 22: mod_base = OTHER; note = 2'-O-methyl modified nucleotide
  modified_base 23: mod_base = OTHER; note = 2'-fluoro modified nucleotide
  modified_base 24: mod_base = OTHER; note = 2'-O-methyl modified nucleotide
  modified_base 25: mod_base = OTHER; note = 2'-fluoro modified nucleotide
  modified_base 26: mod_base = OTHER; note = 2'-O-methyl modified nucleotide
  modified_base 27: mod_base = OTHER; note = 2'-fluoro modified nucleotide
  modified_base 28: mod_base = OTHER; note = 2'-O-methyl modified nucleotide
  modified_base 29: mod_base = OTHER; note = 2'-fluoro modified nucleotide
  modified_base 30: mod_base = OTHER; note = 2'-O-methyl modified nucleotide
  modified_base 31: mod_base = OTHER; note = 2'-fluoro modified nucleotide with phosphorothioate linkage
  modified_base 32: mod_base = OTHER; note = 2'-O-methyl modified nucleotide with phosphorothioate linkage
  modified_base 33: mod_base = OTHER; note = 2'-fluoro trivalent N-acetylgalactosamine modified nucleotide
ngaaattgtattttatctgaaaatacaatttca

SEQ ID NO: 2024 - RNA, 33 nt, synthetic construct
  source 1..33: mol_type = other RNA
  misc_difference 1: note = 2'-O-methyl modified nucleotide with phosphorothioate linkage may be 5' phosphate modified
  modified_base 2: mod_base = OTHER; note = 2'-fluoro modified nucleotide with phosphorothioate linkage
  modified_base 3: mod_base = OTHER; note = 2'-O-methyl modified nucleotide
  modified_base 4: mod_base = OTHER; note = 2'-fluoro modified nucleotide
  modified_base 5: mod_base = OTHER; note = 2'-O-methyl modified nucleotide
  modified_base 6: mod_base = OTHER; note = 2'-fluoro modified nucleotide
  modified_base 7: mod_base = OTHER; note = 2'-O-methyl modified nucleotide
  modified_base 8: mod_base = OTHER; note = 2'-fluoro modified nucleotide
  modified_base 9: mod_base = OTHER; note = 2'-O-methyl modified nucleotide
  modified_base 10: mod_base = OTHER; note = 2'-fluoro modified nucleotide
  modified_base 11: mod_base = OTHER; note = 2'-O-methyl modified nucleotide
  modified_base 12: mod_base = OTHER; note = 2'-fluoro modified nucleotide
  modified_base 13: mod_base = OTHER; note = 2'-O-methyl modified nucleotide
  modified_base 14: mod_base = OTHER; note = 2'-fluoro modified nucleotide with phosphorothioate linkage
  modified_base 15: mod_base = OTHER; note = 2'-O-methyl modified nucleotide with phosphorothioate linkage
  modified_base 16: mod_base = OTHER; note = 2'-fluoro modified nucleotide with phosphorothioate linkage
  modified_base 17: mod_base = OTHER; note = 2'-O-methyl modified nucleotide with phosphorothioate linkage
  modified_base 18: mod_base = OTHER; note = 2'-fluoro modified nucleotide with phosphorothioate linkage
  modified_base 19: mod_base = OTHER; note = 2'-O-methyl modified nucleotide with phosphorothioate linkage
  modified_base 20: mod_base = OTHER; note = 2'-O-methyl modified nucleotide
  modified_base 21: mod_base = OTHER; note = 2'-fluoro modified nucleotide
  modified_base 22: mod_base = OTHER; note = 2'-O-methyl modified nucleotide
  modified_base 23: mod_base = OTHER; note = 2'-fluoro modified nucleotide
  modified_base 24: mod_base = OTHER; note = 2'-O-methyl modified nucleotide
  modified_base 25: mod_base = OTHER; note = 2'-fluoro modified nucleotide
  modified_base 26: mod_base = OTHER; note = 2'-O-methyl modified nucleotide
  modified_base 27: mod_base = OTHER; note = 2'-fluoro modified nucleotide
  modified_base 28: mod_base = OTHER; note = 2'-O-methyl modified nucleotide
  modified_base 29: mod_base = OTHER; note = 2'-fluoro modified nucleotide
  modified_base 30: mod_base = OTHER; note = 2'-O-methyl modified nucleotide
  modified_base 31: mod_base = OTHER; note = 2'-fluoro modified nucleotide with phosphorothioate linkage
  modified_base 32: mod_base = OTHER; note = 2'-O-methyl modified nucleotide with phosphorothioate linkage
  modified_base 33: mod_base = OTHER; note = 2'-fluoro trivalent N-acetylgalactosamine modified nucleotide
ngtaatttcaaaattcttaattttgaaattaca

SEQ ID NO: 2025 - RNA, 33 nt, synthetic construct
  source 1..33: mol_type = other RNA
  misc_difference 1: note = 2'-O-methyl modified nucleotide with phosphorothioate linkage may be 5' phosphate modified
  modified_base 2: mod_base = OTHER; note = 2'-fluoro modified nucleotide with phosphorothioate linkage
  modified_base 3: mod_base = OTHER; note = 2'-O-methyl modified nucleotide
  modified_base 4: mod_base = OTHER; note = 2'-fluoro modified nucleotide
  modified_base 5: mod_base = OTHER; note = 2'-O-methyl modified nucleotide
  modified_base 6: mod_base = OTHER; note = 2'-fluoro modified nucleotide
  modified_base 7: mod_base = OTHER; note = 2'-O-methyl modified nucleotide
  modified_base 8: mod_base = OTHER; note = 2'-fluoro modified nucleotide
  modified_base 9: mod_base = OTHER; note = 2'-O-methyl modified nucleotide
  modified_base 10: mod_base = OTHER; note = 2'-fluoro modified nucleotide
  modified_base 11: mod_base = OTHER; note = 2'-O-methyl modified nucleotide
  modified_base 12: mod_base = OTHER; note = 2'-fluoro modified nucleotide
  modified_base 13: mod_base = OTHER; note = 2'-O-methyl modified nucleotide
  modified_base 14: mod_base = OTHER; note = 2'-fluoro modified nucleotide with phosphorothioate linkage
  modified_base 15: mod_base = OTHER; note = 2'-O-methyl modified nucleotide with phosphorothioate linkage
  modified_base 16: mod_base = OTHER; note = 2'-fluoro modified nucleotide with phosphorothioate linkage
  modified_base 17: mod_base = OTHER; note = 2'-O-methyl modified nucleotide with phosphorothioate linkage
  modified_base 18: mod_base = OTHER; note = 2'-fluoro modified nucleotide with phosphorothioate linkage
  modified_base 19: mod_base = OTHER; note = 2'-O-methyl modified nucleotide with phosphorothioate linkage
  modified_base 20: mod_base = OTHER; note = 2'-O-methyl modified nucleotide
  modified_base 21: mod_base = OTHER; note = 2'-fluoro modified nucleotide
  modified_base 22: mod_base = OTHER; note = 2'-O-methyl modified nucleotide
  modified_base 23: mod_base = OTHER; note = 2'-fluoro modified nucleotide
  modified_base 24: mod_base = OTHER; note = 2'-O-methyl modified nucleotide
  modified_base 25: mod_base = OTHER; note = 2'-fluoro modified nucleotide
  modified_base 26: mod_base = OTHER; note = 2'-O-methyl modified nucleotide
  modified_base 27: mod_base = OTHER; note = 2'-fluoro modified nucleotide
  modified_base 28: mod_base = OTHER; note = 2'-O-methyl modified nucleotide
  modified_base 29: mod_base = OTHER; note = 2'-fluoro modified nucleotide
  modified_base 30: mod_base = OTHER; note = 2'-O-methyl modified nucleotide
  modified_base 31: mod_base = OTHER; note = 2'-fluoro modified nucleotide with phosphorothioate linkage
  modified_base 32: mod_base = OTHER; note = 2'-O-methyl modified nucleotide with phosphorothioate linkage
  modified_base 33: mod_base = OTHER; note = 2'-fluoro trivalent N-acetylgalactosamine modified nucleotide
naaaattcttaaagttcttctttaagaatttta

SEQ ID NO: 2026 - RNA, 33 nt, synthetic construct
  source 1..33: mol_type = other RNA
  misc_difference 1: note = 2'-O-methyl modified nucleotide with phosphorothioate linkage may be 5' phosphate modified
  modified_base 2: mod_base = OTHER; note = 2'-fluoro modified nucleotide with phosphorothioate linkage
  modified_base 3: mod_base = OTHER; note = 2'-O-methyl modified nucleotide
  modified_base 4: mod_base = OTHER; note = 2'-fluoro modified nucleotide
  modified_base 5: mod_base = OTHER; note = 2'-O-methyl modified nucleotide
  modified_base 6: mod_base = OTHER; note = 2'-fluoro modified nucleotide
  modified_base 7: mod_base = OTHER; note = 2'-O-methyl modified nucleotide
  modified_base 8: mod_base = OTHER; note = 2'-fluoro modified nucleotide
  modified_base 9: mod_base = OTHER; note = 2'-O-methyl modified nucleotide
  modified_base 10: mod_base = OTHER; note = 2'-fluoro modified nucleotide
  modified_base 11: mod_base = OTHER; note = 2'-O-methyl modified nucleotide
  modified_base 12: mod_base = OTHER; note = 2'-fluoro modified nucleotide
  modified_base 13: mod_base = OTHER; note = 2'-O-methyl modified nucleotide
  modified_base 14: mod_base = OTHER; note = 2'-fluoro modified nucleotide with phosphorothioate linkage
  modified_base 15: mod_base = OTHER; note = 2'-O-methyl modified nucleotide with phosphorothioate linkage
  modified_base 16: mod_base = OTHER; note = 2'-fluoro modified nucleotide with phosphorothioate linkage
  modified_base 17: mod_base = OTHER; note = 2'-O-methyl modified nucleotide with phosphorothioate linkage
  modified_base 18: mod_base = OTHER; note = 2'-fluoro modified nucleotide with phosphorothioate linkage
  modified_base 19: mod_base = OTHER; note = 2'-O-methyl modified nucleotide with phosphorothioate linkage
  modified_base 20: mod_base = OTHER; note = 2'-O-methyl modified nucleotide
  modified_base 21: mod_base = OTHER; note = 2'-fluoro modified nucleotide
  modified_base 22: mod_base = OTHER; note = 2'-O-methyl modified nucleotide
  modified_base 23: mod_base = OTHER; note = 2'-fluoro modified nucleotide
  modified_base 24: mod_base = OTHER; note = 2'-O-methyl modified nucleotide
  modified_base 25: mod_base = OTHER; note = 2'-fluoro modified nucleotide
  modified_base 26: mod_base = OTHER; note = 2'-O-methyl modified nucleotide
  modified_base 27: mod_base = OTHER; note = 2'-fluoro modified nucleotide
  modified_base 28: mod_base = OTHER; note = 2'-O-methyl modified nucleotide
  modified_base 29: mod_base = OTHER; note = 2'-fluoro modified nucleotide
  modified_base 30: mod_base = OTHER; note = 2'-O-methyl modified nucleotide
  modified_base 31: mod_base = OTHER; note = 2'-fluoro modified nucleotide with phosphorothioate linkage
  modified_base 32: mod_base = OTHER; note = 2'-O-methyl modified nucleotide with phosphorothioate linkage
  modified_base 33: mod_base = OTHER; note = 2'-fluoro trivalent N-acetylgalactosamine modified nucleotide
ngaattttggttctgctctagaaccaaaattca

SEQ ID NO: 2027 - RNA, 33 nt, synthetic construct
  source 1..33: mol_type = other RNA
  misc_difference 1: note = 2'-O-methyl modified nucleotide with phosphorothioate linkage may be 5' phosphate modified
  modified_base 2: mod_base = OTHER; note = 2'-fluoro modified nucleotide with phosphorothioate linkage
  modified_base 3: mod_base = OTHER; note = 2'-O-methyl modified nucleotide
  modified_base 4: mod_base = OTHER; note = 2'-fluoro modified nucleotide
  modified_base 5: mod_base = OTHER; note = 2'-O-methyl modified nucleotide
  modified_base 6: mod_base = OTHER; note = 2'-fluoro modified nucleotide
  modified_base 7: mod_base = OTHER; note = 2'-O-methyl modified nucleotide
  modified_base 8: mod_base = OTHER; note = 2'-fluoro modified nucleotide
  modified_base 9: mod_base = OTHER; note = 2'-O-methyl modified nucleotide
  modified_base 10: mod_base = OTHER; note = 2'-fluoro modified nucleotide
  modified_base 11: mod_base = OTHER; note = 2'-O-methyl modified nucleotide
  modified_base 12: mod_base = OTHER; note = 2'-fluoro modified nucleotide
  modified_base 13: mod_base = OTHER; note = 2'-O-methyl modified nucleotide
  modified_base 14: mod_base = OTHER; note = 2'-fluoro modified nucleotide with phosphorothioate linkage
  modified_base 15: mod_base = OTHER; note = 2'-O-methyl modified nucleotide with phosphorothioate linkage
  modified_base 16: mod_base = OTHER; note = 2'-fluoro modified nucleotide with phosphorothioate linkage
  modified_base 17: mod_base = OTHER; note = 2'-O-methyl modified nucleotide with phosphorothioate linkage
  modified_base 18: mod_base = OTHER; note = 2'-fluoro modified nucleotide with phosphorothioate linkage
  modified_base 19: mod_base = OTHER; note = 2'-O-methyl modified nucleotide with phosphorothioate linkage
  modified_base 20: mod_base = OTHER; note = 2'-O-methyl modified nucleotide
  modified_base 21: mod_base = OTHER; note = 2'-fluoro modified nucleotide
  modified_base 22: mod_base = OTHER; note = 2'-O-methyl modified nucleotide
  modified_base 23: mod_base = OTHER; note = 2'-fluoro modified nucleotide
  modified_base 24: mod_base = OTHER; note = 2'-O-methyl modified nucleotide
  modified_base 25: mod_base = OTHER; note = 2'-fluoro modified nucleotide
  modified_base 26: mod_base = OTHER; note = 2'-O-methyl modified nucleotide
  modified_base 27: mod_base = OTHER; note = 2'-fluoro modified nucleotide
  modified_base 28: mod_base = OTHER; note = 2'-O-methyl modified nucleotide
  modified_base 29: mod_base = OTHER; note = 2'-fluoro modified nucleotide
  modified_base 30: mod_base = OTHER; note = 2'-O-methyl modified nucleotide
  modified_base 31: mod_base = OTHER; note = 2'-fluoro modified nucleotide with phosphorothioate linkage
  modified_base 32: mod_base = OTHER; note = 2'-O-methyl modified nucleotide with phosphorothioate linkage
  modified_base 33: mod_base = OTHER; note = 2'-fluoro trivalent N-acetylgalactosamine modified nucleotide
ngtcattttataattatgtattataaaatgaca

SEQ ID NO: 2028 - RNA, 33 nt, synthetic construct
  source 1..33: mol_type = other RNA
  misc_difference 1: note = 2'-O-methyl modified nucleotide with phosphorothioate linkage may be 5' phosphate modified
  modified_base 2: mod_base = OTHER; note = 2'-fluoro modified nucleotide with phosphorothioate linkage
  modified_base 3: mod_base = OTHER; note = 2'-O-methyl modified nucleotide
  modified_base 4: mod_base = OTHER; note = 2'-fluoro modified nucleotide
  modified_base 5: mod_base = OTHER; note = 2'-O-methyl modified nucleotide
  modified_base 6: mod_base = OTHER; note = 2'-fluoro modified nucleotide
  modified_base 7: mod_base = OTHER; note = 2'-O-methyl modified nucleotide
  modified_base 8: mod_base = OTHER; note = 2'-fluoro modified nucleotide
  modified_base 9: mod_base = OTHER; note = 2'-O-methyl modified nucleotide
  modified_base 10: mod_base = OTHER; note = 2'-fluoro modified nucleotide
  modified_base 11: mod_base = OTHER; note = 2'-O-methyl modified nucleotide
  modified_base 12: mod_base = OTHER; note = 2'-fluoro modified nucleotide
  modified_base 13: mod_base = OTHER; note = 2'-O-methyl modified nucleotide
  modified_base 14: mod_base = OTHER; note = 2'-fluoro modified nucleotide with phosphorothioate linkage
  modified_base 15: mod_base = OTHER; note = 2'-O-methyl modified nucleotide with phosphorothioate linkage
  modified_base 16: mod_base = OTHER; note = 2'-fluoro modified nucleotide with phosphorothioate linkage
  modified_base 17: mod_base = OTHER; note = 2'-O-methyl modified nucleotide with phosphorothioate linkage
  modified_base 18: mod_base = OTHER; note = 2'-fluoro modified nucleotide with phosphorothioate linkage
  modified_base 19: mod_base = OTHER; note = 2'-O-methyl modified nucleotide with phosphorothioate linkage
  modified_base 20: mod_base = OTHER; note = 2'-O-methyl modified nucleotide
  modified_base 21: mod_base = OTHER; note = 2'-fluoro modified nucleotide
  modified_base 22: mod_base = OTHER; note = 2'-O-methyl modified nucleotide
  modified_base 23: mod_base = OTHER; note = 2'-fluoro modified nucleotide
  modified_base 24: mod_base = OTHER; note = 2'-O-methyl modified nucleotide
  modified_base 25: mod_base = OTHER; note = 2'-fluoro modified nucleotide
  modified_base 26: mod_base = OTHER; note = 2'-O-methyl modified nucleotide
  modified_base 27: mod_base = OTHER; note = 2'-fluoro modified nucleotide
  modified_base 28: mod_base = OTHER; note = 2'-O-methyl modified nucleotide
  modified_base 29: mod_base = OTHER; note = 2'-fluoro modified nucleotide
  modified_base 30: mod_base = OTHER; note = 2'-O-methyl modified nucleotide
  modified_base 31: mod_base = OTHER; note = 2'-fluoro modified nucleotide with phosphorothioate linkage
  modified_base 32: mod_base = OTHER; note = 2'-O-methyl modified nucleotide with phosphorothioate linkage
  modified_base 33: mod_base = OTHER; note = 2'-fluoro trivalent N-acetylgalactosamine modified nucleotide
ncaaatcctgtactgacaaagtacaggatttga

SEQ ID NO: 2029 - RNA, 33 nt, synthetic construct
  source 1..33: mol_type = other RNA
  misc_difference 1: note = 2'-O-methyl modified nucleotide with phosphorothioate linkage may be 5' phosphate modified
  modified_base 2: mod_base = OTHER; note = 2'-fluoro modified nucleotide with phosphorothioate linkage
  modified_base 3: mod_base = OTHER; note = 2'-O-methyl modified nucleotide
  modified_base 4: mod_base = OTHER; note = 2'-fluoro modified nucleotide
  modified_base 5: mod_base = OTHER; note = 2'-O-methyl modified nucleotide
  modified_base 6: mod_base = OTHER; note = 2'-fluoro modified nucleotide
  modified_base 7: mod_base = OTHER; note = 2'-O-methyl modified nucleotide
  modified_base 8: mod_base = OTHER; note = 2'-fluoro modified nucleotide
  modified_base 9: mod_base = OTHER; note = 2'-O-methyl modified nucleotide
  modified_base 10: mod_base = OTHER; note = 2'-fluoro modified nucleotide
  modified_base 11: mod_base = OTHER; note = 2'-O-methyl modified nucleotide
  modified_base 12: mod_base = OTHER; note = 2'-fluoro modified nucleotide
  modified_base 13: mod_base = OTHER; note = 2'-O-methyl modified nucleotide
  modified_base 14: mod_base = OTHER; note = 2'-fluoro modified nucleotide with phosphorothioate linkage
  modified_base 15: mod_base = OTHER; note = 2'-O-methyl modified nucleotide with phosphorothioate linkage
  modified_base 16: mod_base = OTHER; note = 2'-fluoro modified nucleotide with phosphorothioate linkage
  modified_base 17: mod_base = OTHER; note = 2'-O-methyl modified nucleotide with phosphorothioate linkage
  modified_base 18: mod_base = OTHER; note = 2'-fluoro modified nucleotide with phosphorothioate linkage
  modified_base 19: mod_base = OTHER; note = 2'-O-methyl modified nucleotide with phosphorothioate linkage
  modified_base 20: mod_base = OTHER; note = 2'-O-methyl modified nucleotide
  modified_base 21: mod_base = OTHER; note = 2'-fluoro modified nucleotide
  modified_base 22: mod_base = OTHER; note = 2'-O-methyl modified nucleotide
  modified_base 23: mod_base = OTHER; note = 2'-fluoro modified nucleotide
  modified_base 24: mod_base = OTHER; note = 2'-O-methyl modified nucleotide
  modified_base 25: mod_base = OTHER; note = 2'-fluoro modified nucleotide
  modified_base 26: mod_base = OTHER; note = 2'-O-methyl modified nucleotide
  modified_base 27: mod_base = OTHER; note = 2'-fluoro modified nucleotide
  modified_base 28: mod_base = OTHER; note = 2'-O-methyl modified nucleotide
  modified_base 29: mod_base = OTHER; note = 2'-fluoro modified nucleotide
  modified_base 30: mod_base = OTHER; note = 2'-O-methyl modified nucleotide
  modified_base 31: mod_base = OTHER; note = 2'-fluoro modified nucleotide with phosphorothioate linkage
  modified_base 32: mod_base = OTHER; note = 2'-O-methyl modified nucleotide with phosphorothioate linkage
  modified_base 33: mod_base = OTHER; note = 2'-fluoro trivalent N-acetylgalactosamine modified nucleotide
ngataacttttaatagagaattaaaagttatca

SEQ ID NO: 2030 - RNA, 33 nt, synthetic construct
  source 1..33: mol_type = other RNA
  misc_difference 1: note = 2'-O-methyl modified nucleotide with phosphorothioate linkage may be 5' phosphate modified
  modified_base 2: mod_base = OTHER; note = 2'-fluoro modified nucleotide with phosphorothioate linkage
  modified_base 3: mod_base = OTHER; note = 2'-O-methyl modified nucleotide
  modified_base 4: mod_base = OTHER; note = 2'-fluoro modified nucleotide
  modified_base 5: mod_base = OTHER; note = 2'-O-methyl modified nucleotide
  modified_base 6: mod_base = OTHER; note = 2'-fluoro modified nucleotide
  modified_base 7: mod_base = OTHER; note = 2'-O-methyl modified nucleotide
  modified_base 8: mod_base = OTHER; note = 2'-fluoro modified nucleotide
  modified_base 9: mod_base = OTHER; note = 2'-O-methyl modified nucleotide
  modified_base 10: mod_base = OTHER; note = 2'-fluoro modified nucleotide
  modified_base 11: mod_base = OTHER; note = 2'-O-methyl modified nucleotide
  modified_base 12: mod_base = OTHER; note = 2'-fluoro modified nucleotide
  modified_base 13: mod_base = OTHER; note = 2'-O-methyl modified nucleotide
  modified_base 14: mod_base = OTHER; note = 2'-fluoro modified nucleotide with phosphorothioate linkage
  modified_base 15: mod_base = OTHER; note = 2'-O-methyl modified nucleotide with phosphorothioate linkage
  modified_base 16: mod_base = OTHER; note = 2'-fluoro modified nucleotide with phosphorothioate linkage
  modified_base 17: mod_base = OTHER; note = 2'-O-methyl modified nucleotide with phosphorothioate linkage
  modified_base 18: mod_base = OTHER; note = 2'-fluoro modified nucleotide with phosphorothioate linkage
  modified_base 19: mod_base = OTHER; note = 2'-O-methyl modified nucleotide with phosphorothioate linkage
  modified_base 20: mod_base = OTHER; note = 2'-O-methyl modified nucleotide
  modified_base 21: mod_base = OTHER; note = 2'-fluoro modified nucleotide
  modified_base 22: mod_base = OTHER; note = 2'-O-methyl modified nucleotide
  modified_base 23: mod_base = OTHER; note = 2'-fluoro modified nucleotide
  modified_base 24: mod_base = OTHER; note = 2'-O-methyl modified nucleotide
  modified_base 25: mod_base = OTHER; note = 2'-fluoro modified nucleotide
  modified_base 26: mod_base = OTHER; note = 2'-O-methyl modified nucleotide
  modified_base 27: mod_base = OTHER; note = 2'-fluoro modified nucleotide
  modified_base 28: mod_base = OTHER; note = 2'-O-methyl modified nucleotide
  modified_base 29: mod_base = OTHER; note = 2'-fluoro modified nucleotide
  modified_base 30: mod_base = OTHER; note = 2'-O-methyl modified nucleotide
  modified_base 31: mod_base = OTHER; note = 2'-fluoro modified nucleotide with phosphorothioate linkage
  modified_base 32: mod_base = OTHER; note = 2'-O-methyl modified nucleotide with phosphorothioate linkage
  modified_base 33: mod_base = OTHER; note = 2'-fluoro trivalent N-acetylgalactosamine modified nucleotide
nttaagtcttctcttattcagagaagacttaaa

SEQ ID NO: 2031 - RNA, 33 nt, synthetic construct
  source 1..33: mol_type = other RNA
  misc_difference 1: note = 2'-O-methyl modified nucleotide with phosphorothioate linkage may be 5' phosphate modified
  modified_base 2: mod_base = OTHER; note = 2'-fluoro modified nucleotide with phosphorothioate linkage
  modified_base 3: mod_base = OTHER; note = 2'-O-methyl modified nucleotide
  modified_base 4: mod_base = OTHER; note = 2'-fluoro modified nucleotide
  modified_base 5: mod_base = OTHER; note = 2'-O-methyl modified nucleotide
  modified_base 6: mod_base = OTHER; note = 2'-fluoro modified nucleotide
  modified_base 7: mod_base = OTHER; note = 2'-O-methyl modified nucleotide
  modified_base 8: mod_base = OTHER; note = 2'-fluoro modified nucleotide
  modified_base 9: mod_base = OTHER; note = 2'-O-methyl modified nucleotide
  modified_base 10: mod_base = OTHER; note = 2'-fluoro modified nucleotide
  modified_base 11: mod_base = OTHER; note = 2'-O-methyl modified nucleotide
  modified_base 12: mod_base = OTHER; note = 2'-fluoro modified nucleotide
  modified_base 13: mod_base = OTHER; note = 2'-O-methyl modified nucleotide
  modified_base 14: mod_base = OTHER; note = 2'-fluoro modified nucleotide with phosphorothioate linkage
  modified_base 15: mod_base = OTHER; note = 2'-O-methyl modified nucleotide with phosphorothioate linkage
  modified_base 16: mod_base = OTHER; note = 2'-fluoro modified nucleotide with phosphorothioate linkage
  modified_base 17: mod_base = OTHER; note = 2'-O-methyl modified nucleotide with phosphorothioate linkage
  modified_base 18: mod_base = OTHER; note = 2'-fluoro modified nucleotide with phosphorothioate linkage
  modified_base 19: mod_base = OTHER; note = 2'-O-methyl modified nucleotide with phosphorothioate linkage
  modified_base 20: mod_base = OTHER; note = 2'-O-methyl modified nucleotide
  modified_base 21: mod_base = OTHER; note = 2'-fluoro modified nucleotide
  modified_base 22: mod_base = OTHER; note = 2'-O-methyl modified nucleotide
  modified_base 23: mod_base = OTHER; note = 2'-fluoro modified nucleotide
  modified_base 24: mod_base = OTHER; note = 2'-O-methyl modified nucleotide
  modified_base 25: mod_base = OTHER; note = 2'-fluoro modified nucleotide
  modified_base 26: mod_base = OTHER; note = 2'-O-methyl modified nucleotide
  modified_base 27: mod_base = OTHER; note = 2'-fluoro modified nucleotide
  modified_base 28: mod_base = OTHER; note = 2'-O-methyl modified nucleotide
  modified_base 29: mod_base = OTHER; note = 2'-fluoro modified nucleotide
  modified_base 30: mod_base = OTHER; note = 2'-O-methyl modified nucleotide
  modified_base 31: mod_base = OTHER; note = 2'-fluoro modified nucleotide with phosphorothioate linkage
  modified_base 32: mod_base = OTHER; note = 2'-O-methyl modified nucleotide with phosphorothioate linkage
  modified_base 33: mod_base = OTHER; note = 2'-fluoro trivalent N-acetylgalactosamine modified nucleotide
nataattccaatatgatcaatattggaattata

SEQ ID NO: 2032 - RNA, 33 nt, synthetic construct
  source 1..33: mol_type = other RNA
  misc_difference 1: note = 2'-O-methyl modified nucleotide with phosphorothioate linkage may be 5' phosphate modified
  modified_base 2: mod_base = OTHER; note = 2'-fluoro modified nucleotide with phosphorothioate linkage
  modified_base 3: mod_base = OTHER; note = 2'-O-methyl modified nucleotide
  modified_base 4: mod_base = OTHER; note = 2'-fluoro modified nucleotide
  modified_base 5: mod_base = OTHER; note = 2'-O-methyl modified nucleotide
  modified_base 6: mod_base = OTHER; note = 2'-fluoro modified nucleotide
  modified_base 7: mod_base = OTHER; note = 2'-O-methyl modified nucleotide
  modified_base 8: mod_base = OTHER; note = 2'-fluoro modified nucleotide
  modified_base 9: mod_base = OTHER; note = 2'-O-methyl modified nucleotide
  modified_base 10: mod_base = OTHER; note = 2'-fluoro modified nucleotide
  modified_base 11: mod_base = OTHER; note = 2'-O-methyl modified nucleotide
  modified_base 12: mod_base = OTHER; note = 2'-fluoro modified nucleotide
  modified_base 13: mod_base = OTHER; note = 2'-O-methyl modified nucleotide
  modified_base 14: mod_base = OTHER; note = 2'-fluoro modified nucleotide with phosphorothioate linkage
  modified_base 15: mod_base = OTHER; note = 2'-O-methyl modified nucleotide with phosphorothioate linkage
  modified_base 16: mod_base = OTHER; note = 2'-fluoro modified nucleotide with phosphorothioate linkage
  modified_base 17: mod_base = OTHER; note = 2'-O-methyl modified nucleotide with phosphorothioate linkage
  modified_base 18: mod_base = OTHER; note = 2'-fluoro modified nucleotide with phosphorothioate linkage
  modified_base 19: mod_base = OTHER; note = 2'-O-methyl modified nucleotide with phosphorothioate linkage
  modified_base 20: mod_base = OTHER; note = 2'-O-methyl modified nucleotide
  modified_base 21: mod_base = OTHER; note = 2'-fluoro modified nucleotide
  modified_base 22: mod_base = OTHER; note = 2'-O-methyl modified nucleotide
  modified_base 23: mod_base = OTHER; note = 2'-fluoro modified nucleotide
  modified_base 24: mod_base = OTHER; note = 2'-O-methyl modified nucleotide
  modified_base 25: mod_base = OTHER; note = 2'-fluoro modified nucleotide
  modified_base 26: mod_base = OTHER; note = 2'-O-methyl modified nucleotide
  modified_base 27: mod_base = OTHER; note = 2'-fluoro modified nucleotide
  modified_base 28: mod_base = OTHER; note = 2'-O-methyl modified nucleotide
  modified_base 29: mod_base = OTHER; note = 2'-fluoro modified nucleotide
  modified_base 30: mod_base = OTHER; note = 2'-O-methyl modified nucleotide
  modified_base 31: mod_base = OTHER; note = 2'-fluoro modified nucleotide with phosphorothioate linkage
  modified_base 32: mod_base = OTHER; note = 2'-O-methyl modified nucleotide with phosphorothioate linkage
  modified_base 33: mod_base = OTHER; note = 2'-fluoro trivalent N-acetylgalactosamine modified nucleotide
ngataaatgaacatggcctatgttcatttatca

SEQ ID NO: 2033 - RNA, 33 nt, synthetic construct
  source 1..33: mol_type = other RNA
  misc_difference 1: note = 2'-O-methyl modified nucleotide with phosphorothioate linkage may be 5' phosphate modified
  modified_base 2: mod_base = OTHER; note = 2'-fluoro modified nucleotide with phosphorothioate linkage
  modified_base 3: mod_base = OTHER; note = 2'-O-methyl modified nucleotide
  modified_base 4: mod_base = OTHER; note = 2'-fluoro modified nucleotide
  modified_base 5: mod_base = OTHER; note = 2'-O-methyl modified nucleotide
  modified_base 6: mod_base = OTHER; note = 2'-fluoro modified nucleotide
  modified_base 7: mod_base = OTHER; note = 2'-O-methyl modified nucleotide
  modified_base 8: mod_base = OTHER; note = 2'-fluoro modified nucleotide
  modified_base 9: mod_base = OTHER; note = 2'-O-methyl modified nucleotide
  modified_base 10: mod_base = OTHER; note = 2'-fluoro modified nucleotide
  modified_base 11: mod_base = OTHER; note = 2'-O-methyl modified nucleotide
  modified_base 12: mod_base = OTHER; note = 2'-fluoro modified nucleotide
  modified_base 13: mod_base = OTHER; note = 2'-O-methyl modified nucleotide
  modified_base 14: mod_base = OTHER; note = 2'-fluoro modified nucleotide with phosphorothioate linkage
  modified_base 15: mod_base = OTHER; note = 2'-O-methyl modified nucleotide with phosphorothioate linkage
  modified_base 16: mod_base = OTHER; note = 2'-fluoro modified nucleotide with phosphorothioate linkage
  modified_base 17: mod_base = OTHER; note = 2'-O-methyl modified nucleotide with phosphorothioate linkage
  modified_base 18: mod_base = OTHER; note = 2'-fluoro modified nucleotide with phosphorothioate linkage
  modified_base 19: mod_base = OTHER; note = 2'-O-methyl modified nucleotide with phosphorothioate linkage
  modified_base 20: mod_base = OTHER; note = 2'-O-methyl modified nucleotide
  modified_base 21: mod_base = OTHER; note = 2'-fluoro modified nucleotide
  modified_base 22: mod_base = OTHER; note = 2'-O-methyl modified nucleotide
  modified_base 23: mod_base = OTHER; note = 2'-fluoro modified nucleotide
  modified_base 24: mod_base = OTHER; note = 2'-O-methyl modified nucleotide
  modified_base 25: mod_base = OTHER; note = 2'-fluoro modified nucleotide
  modified_base 26: mod_base = OTHER; note = 2'-O-methyl modified nucleotide
  modified_base 27: mod_base = OTHER; note = 2'-fluoro modified nucleotide
  modified_base 28: mod_base = OTHER; note = 2'-O-methyl modified nucleotide
  modified_base 29: mod_base = OTHER; note = 2'-fluoro modified nucleotide
  modified_base 30: mod_base = OTHER; note = 2'-O-methyl modified nucleotide
  modified_base 31: mod_base = OTHER; note = 2'-fluoro modified nucleotide with phosphorothioate linkage
  modified_base 32: mod_base = OTHER; note = 2'-O-methyl modified nucleotide with phosphorothioate linkage
  modified_base 33: mod_base = OTHER; note = 2'-fluoro trivalent N-acetylgalactosamine modified nucleotide
naaggttcatcattttcttaatgatgaacctta

SEQ ID NO: 2034 - RNA, 33 nt, synthetic construct
  source 1..33: mol_type = other RNA
  misc_difference 1: note = 2'-O-methyl modified nucleotide with phosphorothioate linkage may be 5' phosphate modified
  modified_base 2: mod_base = OTHER; note = 2'-fluoro modified nucleotide with phosphorothioate linkage
  modified_base 3: mod_base = OTHER; note = 2'-O-methyl modified nucleotide
  modified_base 4: mod_base = OTHER; note = 2'-fluoro modified nucleotide
  modified_base 5: mod_base = OTHER; note = 2'-O-methyl modified nucleotide
  modified_base 6: mod_base = OTHER; note = 2'-fluoro modified nucleotide
  modified_base 7: mod_base = OTHER; note = 2'-O-methyl modified nucleotide
  modified_base 8: mod_base = OTHER; note = 2'-fluoro modified nucleotide
  modified_base 9: mod_base = OTHER; note = 2'-O-methyl modified nucleotide
  modified_base 10: mod_base = OTHER; note = 2'-fluoro modified nucleotide
  modified_base 11: mod_base = OTHER; note = 2'-O-methyl modified nucleotide
  modified_base 12: mod_base = OTHER; note = 2'-fluoro modified nucleotide
  modified_base 13: mod_base = OTHER; note = 2'-O-methyl modified nucleotide
  modified_base 14: mod_base = OTHER; note = 2'-fluoro modified nucleotide with phosphorothioate linkage
  modified_base 15: mod_base = OTHER; note = 2'-O-methyl modified nucleotide with phosphorothioate linkage
  modified_base 16: mod_base = OTHER; note = 2'-fluoro modified nucleotide with phosphorothioate linkage
  modified_base 17: mod_base = OTHER; note = 2'-O-methyl modified nucleotide with phosphorothioate linkage
  modified_base 18: mod_base = OTHER; note = 2'-fluoro modified nucleotide with phosphorothioate linkage
  modified_base 19: mod_base = OTHER; note = 2'-O-methyl modified nucleotide with phosphorothioate linkage
  modified_base 20: mod_base = OTHER; note = 2'-O-methyl modified nucleotide
  modified_base 21: mod_base = OTHER; note = 2'-fluoro modified nucleotide
  modified_base 22: mod_base = OTHER; note = 2'-O-methyl modified nucleotide
  modified_base 23: mod_base = OTHER; note = 2'-fluoro modified nucleotide
  modified_base 24: mod_base = OTHER; note = 2'-O-methyl modified nucleotide
  modified_base 25: mod_base = OTHER; note = 2'-fluoro modified nucleotide
  modified_base 26: mod_base = OTHER; note = 2'-O-methyl modified nucleotide
  modified_base 27: mod_base = OTHER; note = 2'-fluoro modified nucleotide
  modified_base 28: mod_base = OTHER; note = 2'-O-methyl modified nucleotide
  modified_base 29: mod_base = OTHER; note = 2'-fluoro modified nucleotide
  modified_base 30: mod_base = OTHER; note = 2'-O-methyl modified nucleotide
  modified_base 31: mod_base = OTHER; note = 2'-fluoro modified nucleotide with phosphorothioate linkage
  modified_base 32: mod_base = OTHER; note = 2'-O-methyl modified nucleotide with phosphorothioate linkage
  modified_base 33: mod_base = OTHER; note = 2'-fluoro trivalent N-acetylgalactosamine modified nucleotide
nggaagtgctataaaacatttatagcacttcca

SEQ ID NO: 2035 - RNA, 33 nt, synthetic construct
  source 1..33: mol_type = other RNA
  misc_difference 1: note = 2'-O-methyl modified nucleotide with phosphorothioate linkage may be 5' phosphate modified
  modified_base 2: mod_base = OTHER; note = 2'-fluoro modified nucleotide with phosphorothioate linkage
  modified_base 3: mod_base = OTHER; note = 2'-O-methyl modified nucleotide
  modified_base 4: mod_base = OTHER; note = 2'-fluoro modified nucleotide
  modified_base 5: mod_base = OTHER; note = 2'-O-methyl modified nucleotide
  modified_base 6: mod_base = OTHER; note = 2'-fluoro modified nucleotide
  modified_base 7: mod_base = OTHER; note = 2'-O-methyl modified nucleotide
  modified_base 8: mod_base = OTHER; note = 2'-fluoro modified nucleotide
  modified_base 9: mod_base = OTHER; note = 2'-O-methyl modified nucleotide
  modified_base 10: mod_base = OTHER; note = 2'-fluoro modified nucleotide
  modified_base 11: mod_base = OTHER; note = 2'-O-methyl modified nucleotide
  modified_base 12: mod_base = OTHER; note = 2'-fluoro modified nucleotide
  modified_base 13: mod_base = OTHER; note = 2'-O-methyl modified nucleotide
  modified_base 14: mod_base = OTHER; note = 2'-fluoro modified nucleotide with phosphorothioate linkage
  modified_base 15: mod_base = OTHER; note = 2'-O-methyl modified nucleotide with phosphorothioate linkage
  modified_base 16: mod_base = OTHER; note = 2'-fluoro modified nucleotide with phosphorothioate linkage
  modified_base 17: mod_base = OTHER; note = 2'-O-methyl modified nucleotide with phosphorothioate linkage
  modified_base 18: mod_base = OTHER; note = 2'-fluoro modified nucleotide with phosphorothioate linkage
  modified_base 19: mod_base = OTHER; note = 2'-O-methyl modified nucleotide with phosphorothioate linkage
  modified_base 20: mod_base = OTHER; note = 2'-O-methyl modified nucleotide
  modified_base 21: mod_base = OTHER; note = 2'-fluoro modified nucleotide
  modified_base 22: mod_base = OTHER; note = 2'-O-methyl modified nucleotide
  modified_base 23: mod_base = OTHER; note = 2'-fluoro modified nucleotide
  modified_base 24: mod_base = OTHER; note = 2'-O-methyl modified nucleotide
  modified_base 25: mod_base = OTHER; note = 2'-fluoro modified nucleotide
  modified_base 26: mod_base = OTHER; note = 2'-O-methyl modified nucleotide
  modified_base 27: mod_base = OTHER; note = 2'-fluoro modified nucleotide
  modified_base 28: mod_base = OTHER; note = 2'-O-methyl modified nucleotide
  modified_base 29: mod_base = OTHER; note = 2'-fluoro modified nucleotide
  modified_base 30: mod_base = OTHER; note = 2'-O-methyl modified nucleotide
  modified_base 31: mod_base = OTHER; note = 2'-fluoro modified nucleotide with phosphorothioate linkage
  modified_base 32: mod_base = OTHER; note = 2'-O-methyl modified nucleotide with phosphorothioate linkage
  modified_base 33: mod_base = OTHER; note = 2'-fluoro trivalent N-acetylgalactosamine modified nucleotide
ncaagtactcttaaagcaattaagagtacttga

SEQ ID NO: 2036 - RNA, 33 nt, synthetic construct
  source 1..33: mol_type = other RNA
  misc_difference 1: note = 2'-O-methyl modified nucleotide with phosphorothioate linkage may be 5' phosphate modified
  modified_base 2: mod_base = OTHER; note = 2'-fluoro modified nucleotide with phosphorothioate linkage
  modified_base 3: mod_base = OTHER; note = 2'-O-methyl modified nucleotide
  modified_base 4: mod_base = OTHER; note = 2'-fluoro modified nucleotide
  modified_base 5: mod_base = OTHER; note = 2'-O-methyl modified nucleotide
  modified_base 6: mod_base = OTHER; note = 2'-fluoro modified nucleotide
  modified_base 7: mod_base = OTHER; note = 2'-O-methyl modified nucleotide
  modified_base 8: mod_base = OTHER; note = 2'-fluoro modified nucleotide
  modified_base 9: mod_base = OTHER; note = 2'-O-methyl modified nucleotide
  modified_base 10: mod_base = OTHER; note = 2'-fluoro modified nucleotide
  modified_base 11: mod_base = OTHER; note = 2'-O-methyl modified nucleotide
  modified_base 12: mod_base = OTHER; note = 2'-fluoro modified nucleotide
  modified_base 13: mod_base = OTHER; note = 2'-O-methyl modified nucleotide
  modified_base 14: mod_base = OTHER; note = 2'-fluoro modified nucleotide with phosphorothioate linkage
  modified_base 15: mod_base = OTHER; note = 2'-O-methyl modified nucleotide with phosphorothioate linkage
  modified_base 16: mod_base = OTHER; note = 2'-fluoro modified nucleotide with phosphorothioate linkage
  modified_base 17: mod_base = OTHER; note = 2'-O-methyl modified nucleotide with phosphorothioate linkage
  modified_base 18: mod_base = OTHER; note = 2'-fluoro modified nucleotide with phosphorothioate linkage
  modified_base 19: mod_base = OTHER; note = 2'-O-methyl modified nucleotide with phosphorothioate linkage
  modified_base 20: mod_base = OTHER; note = 2'-O-methyl modified nucleotide
  modified_base 21: mod_base = OTHER; note = 2'-fluoro modified nucleotide
  modified_base 22: mod_base = OTHER; note = 2'-O-methyl modified nucleotide
  modified_base 23: mod_base = OTHER; note = 2'-fluoro modified nucleotide
  modified_base 24: mod_base = OTHER; note = 2'-O-methyl modified nucleotide
  modified_base 25: mod_base = OTHER; note = 2'-fluoro modified nucleotide
  modified_base 26: mod_base = OTHER; note = 2'-O-methyl modified nucleotide
  modified_base 27: mod_base = OTHER; note = 2'-fluoro modified nucleotide
  modified_base 28: mod_base = OTHER; note = 2'-O-methyl modified nucleotide
  modified_base 29: mod_base = OTHER; note = 2'-fluoro modified nucleotide
  modified_base 30: mod_base = OTHER; note = 2'-O-methyl modified nucleotide
  modified_base 31: mod_base = OTHER; note = 2'-fluoro modified nucleotide with phosphorothioate linkage
  modified_base 32: mod_base = OTHER; note = 2'-O-methyl modified nucleotide with phosphorothioate linkage
  modified_base 33: mod_base = OTHER; note = 2'-fluoro trivalent N-acetylgalactosamine modified nucleotide
nccaatgatttcctgtttcaggaaatcattgga

SEQ ID NO: 2037 - RNA, 33 nt, synthetic construct
  source 1..33: mol_type = other RNA
  misc_difference 1: note = 2'-O-methyl modified nucleotide with phosphorothioate linkage may be 5' phosphate modified
  modified_base 2: mod_base = OTHER; note = 2'-fluoro modified nucleotide with phosphorothioate linkage
  modified_base 3: mod_base = OTHER; note = 2'-O-methyl modified nucleotide
  modified_base 4: mod_base = OTHER; note = 2'-fluoro modified nucleotide
  modified_base 5: mod_base = OTHER; note = 2'-O-methyl modified nucleotide
  modified_base 6: mod_base = OTHER; note = 2'-fluoro modified nucleotide
  modified_base 7: mod_base = OTHER; note = 2'-O-methyl modified nucleotide
  modified_base 8: mod_base = OTHER; note = 2'-fluoro modified nucleotide
  modified_base 9: mod_base = OTHER; note = 2'-O-methyl modified nucleotide
  modified_base 10: mod_base = OTHER; note = 2'-fluoro modified nucleotide
  modified_base 11: mod_base = OTHER; note = 2'-O-methyl modified nucleotide
  modified_base 12: mod_base = OTHER; note = 2'-fluoro modified nucleotide
  modified_base 13: mod_base = OTHER; note = 2'-O-methyl modified nucleotide
  modified_base 14: mod_base = OTHER; note = 2'-fluoro modified nucleotide with phosphorothioate linkage
  modified_base 15: mod_base = OTHER; note = 2'-O-methyl modified nucleotide with phosphorothioate linkage
  modified_base 16: mod_base = OTHER; note = 2'-fluoro modified nucleotide with phosphorothioate linkage
  modified_base 17: mod_base = OTHER; note = 2'-O-methyl modified nucleotide with phosphorothioate linkage
  modified_base 18: mod_base = OTHER; note = 2'-fluoro modified nucleotide with phosphorothioate linkage
  modified_base 19: mod_base = OTHER; note = 2'-O-methyl modified nucleotide with phosphorothioate linkage
  modified_base 20: mod_base = OTHER; note = 2'-O-methyl modified nucleotide
  modified_base 21: mod_base = OTHER; note = 2'-fluoro modified nucleotide
  modified_base 22: mod_base = OTHER; note = 2'-O-methyl modified nucleotide
  modified_base 23: mod_base = OTHER; note = 2'-fluoro modified nucleotide
  modified_base 24: mod_base = OTHER; note = 2'-O-methyl modified nucleotide
  modified_base 25: mod_base = OTHER; note = 2'-fluoro modified nucleotide
  modified_base 26: mod_base = OTHER; note = 2'-O-methyl modified nucleotide
  modified_base 27: mod_base = OTHER; note = 2'-fluoro modified nucleotide
  modified_base 28: mod_base = OTHER; note = 2'-O-methyl modified nucleotide
  modified_base 29: mod_base = OTHER; note = 2'-fluoro modified nucleotide
  modified_base 30: mod_base = OTHER; note = 2'-O-methyl modified nucleotide
  modified_base 31: mod_base = OTHER; note = 2'-fluoro modified nucleotide with phosphorothioate linkage
  modified_base 32: mod_base = OTHER; note = 2'-O-methyl modified nucleotide with phosphorothioate linkage
  modified_base 33: mod_base = OTHER; note = 2'-fluoro trivalent N-acetylgalactosamine modified nucleotide
natggtatattcatttccaatgaatataccata

SEQ ID NO: 2038 - RNA, 33 nt, synthetic construct
  source 1..33: mol_type = other RNA
  misc_difference 1: note = 2'-O-methyl modified nucleotide with phosphorothioate linkage may be 5' phosphate modified
  modified_base 2: mod_base = OTHER; note = 2'-fluoro modified nucleotide with phosphorothioate linkage
  modified_base 3: mod_base = OTHER; note = 2'-O-methyl modified nucleotide
  modified_base 4: mod_base = OTHER; note = 2'-fluoro modified nucleotide
  modified_base 5: mod_base = OTHER; note = 2'-O-methyl modified nucleotide
  modified_base 6: mod_base = OTHER; note = 2'-fluoro modified nucleotide
  modified_base 7: mod_base = OTHER; note = 2'-O-methyl modified nucleotide
  modified_base 8: mod_base = OTHER; note = 2'-fluoro modified nucleotide
  modified_base 9: mod_base = OTHER; note = 2'-O-methyl modified nucleotide
  modified_base 10: mod_base = OTHER; note = 2'-fluoro modified nucleotide
  modified_base 11: mod_base = OTHER; note = 2'-O-methyl modified nucleotide
  modified_base 12: mod_base = OTHER; note = 2'-fluoro modified nucleotide
  modified_base 13: mod_base = OTHER; note = 2'-O-methyl modified nucleotide
  modified_base 14: mod_base = OTHER; note = 2'-fluoro modified nucleotide with phosphorothioate linkage
  modified_base 15: mod_base = OTHER; note = 2'-O-methyl modified nucleotide with phosphorothioate linkage
  modified_base 16: mod_base = OTHER; note = 2'-fluoro modified nucleotide with phosphorothioate linkage
  modified_base 17: mod_base = OTHER; note = 2'-O-methyl modified nucleotide with phosphorothioate linkage
  modified_base 18: mod_base = OTHER; note = 2'-fluoro modified nucleotide with phosphorothioate linkage
  modified_base 19: mod_base = OTHER; note = 2'-O-methyl modified nucleotide with phosphorothioate linkage
  modified_base 20: mod_base = OTHER; note = 2'-O-methyl modified nucleotide
  modified_base 21: mod_base = OTHER; note = 2'-fluoro modified nucleotide
  modified_base 22: mod_base = OTHER; note = 2'-O-methyl modified nucleotide
  modified_base 23: mod_base = OTHER; note = 2'-fluoro modified nucleotide
  modified_base 24: mod_base = OTHER; note = 2'-O-methyl modified nucleotide
  modified_base 25: mod_base = OTHER; note = 2'-fluoro modified nucleotide
  modified_base 26: mod_base = OTHER; note = 2'-O-methyl modified nucleotide
  modified_base 27: mod_base = OTHER; note = 2'-fluoro modified nucleotide
  modified_base 28: mod_base = OTHER; note = 2'-O-methyl modified nucleotide
  modified_base 29: mod_base = OTHER; note = 2'-fluoro modified nucleotide
  modified_base 30: mod_base = OTHER; note = 2'-O-methyl modified nucleotide
  modified_base 31: mod_base = OTHER; note = 2'-fluoro modified nucleotide with phosphorothioate linkage
  modified_base 32: mod_base = OTHER; note = 2'-O-methyl modified nucleotide with phosphorothioate linkage
  modified_base 33: mod_base = OTHER; note = 2'-fluoro trivalent N-acetylgalactosamine modified nucleotide
naacaagatgaacttcccaagttcatcttgtta

SEQ ID NO: 2039 - RNA, 33 nt, synthetic construct
  source 1..33: mol_type = other RNA
  misc_difference 1: note = 2'-O-methyl modified nucleotide with phosphorothioate linkage may be 5' phosphate modified
  modified_base 2: mod_base = OTHER; note = 2'-fluoro modified nucleotide with phosphorothioate linkage
  modified_base 3: mod_base = OTHER; note = 2'-O-methyl modified nucleotide
  modified_base 4: mod_base = OTHER; note = 2'-fluoro modified nucleotide
  modified_base 5: mod_base = OTHER; note = 2'-O-methyl modified nucleotide
  modified_base 6: mod_base = OTHER; note = 2'-fluoro modified nucleotide
  modified_base 7: mod_base = OTHER; note = 2'-O-methyl modified nucleotide
  modified_base 8: mod_base = OTHER; note = 2'-fluoro modified nucleotide
  modified_base 9: mod_base = OTHER; note = 2'-O-methyl modified nucleotide
  modified_base 10: mod_base = OTHER; note = 2'-fluoro modified nucleotide
  modified_base 11: mod_base = OTHER; note = 2'-O-methyl modified nucleotide
  modified_base 12: mod_base = OTHER; note = 2'-fluoro modified nucleotide
  modified_base 13: mod_base = OTHER; note = 2'-O-methyl modified nucleotide
  modified_base 14: mod_base = OTHER; note = 2'-fluoro modified nucleotide with phosphorothioate linkage
  modified_base 15: mod_base = OTHER; note = 2'-O-methyl modified nucleotide with phosphorothioate linkage
  modified_base 16: mod_base = OTHER; note = 2'-fluoro modified nucleotide with phosphorothioate linkage
  modified_base 17: mod_base = OTHER; note = 2'-O-methyl modified nucleotide with phosphorothioate linkage
  modified_base 18: mod_base = OTHER; note = 2'-fluoro modified nucleotide with phosphorothioate linkage
  modified_base 19: mod_base = OTHER; note = 2'-O-methyl modified nucleotide with phosphorothioate linkage
  modified_base 20: mod_base = OTHER; note = 2'-O-methyl modified nucleotide
  modified_base 21: mod_base = OTHER; note = 2'-fluoro modified nucleotide
  modified_base 22: mod_base = OTHER; note = 2'-O-methyl modified nucleotide
  modified_base 23: mod_base = OTHER; note = 2'-fluoro modified nucleotide
  modified_base 24: mod_base = OTHER; note = 2'-O-methyl modified nucleotide
  modified_base 25: mod_base = OTHER; note = 2'-fluoro modified nucleotide
  modified_base 26: mod_base = OTHER; note = 2'-O-methyl modified nucleotide
  modified_base 27: mod_base = OTHER; note = 2'-fluoro modified nucleotide
  modified_base 28: mod_base = OTHER; note = 2'-O-methyl modified nucleotide
  modified_base 29: mod_base = OTHER; note = 2'-fluoro modified nucleotide
  modified_base 30: mod_base = OTHER; note = 2'-O-methyl modified nucleotide
  modified_base 31: mod_base = OTHER; note = 2'-fluoro modified nucleotide with phosphorothioate linkage
  modified_base 32: mod_base = OTHER; note = 2'-O-methyl modified nucleotide with phosphorothioate linkage
  modified_base 33: mod_base = OTHER; note = 2'-fluoro trivalent N-acetylgalactosamine modified nucleotide
ngaacttcaggaattttagattcctgaagttca

SEQ ID NO: 2040 - RNA, 33 nt, synthetic construct
  source 1..33: mol_type = other RNA
  misc_difference 1: note = 2'-O-methyl modified nucleotide with phosphorothioate linkage may be 5' phosphate modified
  modified_base 2: mod_base = OTHER; note = 2'-fluoro modified nucleotide with phosphorothioate linkage
  modified_base 3: mod_base = OTHER; note = 2'-O-methyl modified nucleotide
  modified_base 4: mod_base = OTHER; note = 2'-fluoro modified nucleotide
  modified_base 5: mod_base = OTHER; note = 2'-O-methyl modified nucleotide
  modified_base 6: mod_base = OTHER; note = 2'-fluoro modified nucleotide
  modified_base 7: mod_base = OTHER; note = 2'-O-methyl modified nucleotide
  modified_base 8: mod_base = OTHER; note = 2'-fluoro modified nucleotide
  modified_base 9: mod_base = OTHER; note = 2'-O-methyl modified nucleotide
  modified_base 10: mod_base = OTHER; note = 2'-fluoro modified nucleotide
  modified_base 11: mod_base = OTHER; note = 2'-O-methyl modified nucleotide
  modified_base 12: mod_base = OTHER; note = 2'-fluoro modified nucleotide
  modified_base 13: mod_base = OTHER; note = 2'-O-methyl modified nucleotide
  modified_base 14: mod_base = OTHER; note = 2'-fluoro modified nucleotide with phosphorothioate linkage
  modified_base 15: mod_base = OTHER; note = 2'-O-methyl modified nucleotide with phosphorothioate linkage
  modified_base 16: mod_base = OTHER; note = 2'-fluoro modified nucleotide with phosphorothioate linkage
  modified_base 17: mod_base = OTHER; note = 2'-O-methyl modified nucleotide with phosphorothioate linkage
  modified_base 18: mod_base = OTHER; note = 2'-fluoro modified nucleotide with phosphorothioate linkage
  modified_base 19: mod_base = OTHER; note = 2'-O-methyl modified nucleotide with phosphorothioate linkage
  modified_base 20: mod_base = OTHER; note = 2'-O-methyl modified nucleotide
  modified_base 21: mod_base = OTHER; note = 2'-fluoro modified nucleotide
  modified_base 22: mod_base = OTHER; note = 2'-O-methyl modified nucleotide
  modified_base 23: mod_base = OTHER; note = 2'-fluoro modified nucleotide
  modified_base 24: mod_base = OTHER; note = 2'-O-methyl modified nucleotide
  modified_base 25: mod_base = OTHER; note = 2'-fluoro modified nucleotide
  modified_base 26: mod_base = OTHER; note = 2'-O-methyl modified nucleotide
  modified_base 27: mod_base = OTHER; note = 2'-fluoro modified nucleotide
  modified_base 28: mod_base = OTHER; note = 2'-O-methyl modified nucleotide
  modified_base 29: mod_base = OTHER; note = 2'-fluoro modified nucleotide
  modified_base 30: mod_base = OTHER; note = 2'-O-methyl modified nucleotide
  modified_base 31: mod_base = OTHER; note = 2'-fluoro modified nucleotide with phosphorothioate linkage
  modified_base 32: mod_base = OTHER; note = 2'-O-methyl modified nucleotide with phosphorothioate linkage
  modified_base 33: mod_base = OTHER; note = 2'-fluoro trivalent N-acetylgalactosamine modified nucleotide
nagtcttctcttattccaaataagagaagacta

SEQ ID NO: 2041 - RNA, 33 nt, synthetic construct
  source 1..33: mol_type = other RNA
  misc_difference 1: note = 2'-O-methyl modified nucleotide with phosphorothioate linkage may be 5' phosphate modified
  modified_base 2: mod_base = OTHER; note = 2'-fluoro modified nucleotide with phosphorothioate linkage
  modified_base 3: mod_base = OTHER; note = 2'-O-methyl modified nucleotide
  modified_base 4: mod_base = OTHER; note = 2'-fluoro modified nucleotide
  modified_base 5: mod_base = OTHER; note = 2'-O-methyl modified nucleotide
  modified_base 6: mod_base = OTHER; note = 2'-fluoro modified nucleotide
  modified_base 7: mod_base = OTHER; note = 2'-O-methyl modified nucleotide
  modified_base 8: mod_base = OTHER; note = 2'-fluoro modified nucleotide
  modified_base 9: mod_base = OTHER; note = 2'-O-methyl modified nucleotide
  modified_base 10: mod_base = OTHER; note = 2'-fluoro modified nucleotide
  modified_base 11: mod_base = OTHER; note = 2'-O-methyl modified nucleotide
  modified_base 12: mod_base = OTHER; note = 2'-fluoro modified nucleotide
  modified_base 13: mod_base = OTHER; note = 2'-O-methyl modified nucleotide
  modified_base 14: mod_base = OTHER; note = 2'-fluoro modified nucleotide with phosphorothioate linkage
  modified_base 15: mod_base = OTHER; note = 2'-O-methyl modified nucleotide with phosphorothioate linkage
  modified_base 16: mod_base = OTHER; note = 2'-fluoro modified nucleotide with phosphorothioate linkage
  modified_base 17: mod_base = OTHER; note = 2'-O-methyl modified nucleotide with phosphorothioate linkage
  modified_base 18: mod_base = OTHER; note = 2'-fluoro modified nucleotide with phosphorothioate linkage
  modified_base 19: mod_base = OTHER; note = 2'-O-methyl modified nucleotide with phosphorothioate linkage
  modified_base 20: mod_base = OTHER; note = 2'-O-methyl modified nucleotide
  modified_base 21: mod_base = OTHER; note = 2'-fluoro modified nucleotide
  modified_base 22: mod_base = OTHER; note = 2'-O-methyl modified nucleotide
  modified_base 23: mod_base = OTHER; note = 2'-fluoro modified nucleotide
  modified_base 24: mod_base = OTHER; note = 2'-O-methyl modified nucleotide
  modified_base 25: mod_base = OTHER; note = 2'-fluoro modified nucleotide
  modified_base 26: mod_base = OTHER; note = 2'-O-methyl modified nucleotide
  modified_base 27: mod_base = OTHER; note = 2'-fluoro modified nucleotide
  modified_base 28: mod_base = OTHER; note = 2'-O-methyl modified nucleotide
  modified_base 29: mod_base = OTHER; note = 2'-fluoro modified nucleotide
  modified_base 30: mod_base = OTHER; note = 2'-O-methyl modified nucleotide
  modified_base 31: mod_base = OTHER; note = 2'-fluoro modified nucleotide with phosphorothioate linkage
  modified_base 32: mod_base = OTHER; note = 2'-O-methyl modified nucleotide with phosphorothioate linkage
  modified_base 33: mod_base = OTHER; note = 2'-fluoro trivalent N-acetylgalactosamine modified nucleotide
naatgtttatactttgataaagtataaacatta

SEQ ID NO: 2042 - RNA, 33 nt, synthetic construct
  source 1..33: mol_type = other RNA
  misc_difference 1: note = 2'-O-methyl modified nucleotide with phosphorothioate linkage may be 5' phosphate modified
  modified_base 2: mod_base = OTHER; note = 2'-fluoro modified nucleotide with phosphorothioate linkage
  modified_base 3: mod_base = OTHER; note = 2'-O-methyl modified nucleotide
  modified_base 4: mod_base = OTHER; note = 2'-fluoro modified nucleotide
  modified_base 5: mod_base = OTHER; note = 2'-O-methyl modified nucleotide
  modified_base 6: mod_base = OTHER; note = 2'-fluoro modified nucleotide
  modified_base 7: mod_base = OTHER; note = 2'-O-methyl modified nucleotide
  modified_base 8: mod_base = OTHER; note = 2'-fluoro modified nucleotide
  modified_base 9: mod_base = OTHER; note = 2'-O-methyl modified nucleotide
  modified_base 10: mod_base = OTHER; note = 2'-fluoro modified nucleotide
  modified_base 11: mod_base = OTHER; note = 2'-O-methyl modified nucleotide
  modified_base 12: mod_base = OTHER; note = 2'-fluoro modified nucleotide
  modified_base 13: mod_base = OTHER; note = 2'-O-methyl modified nucleotide
  modified_base 14: mod_base = OTHER; note = 2'-fluoro modified nucleotide with phosphorothioate linkage
  modified_base 15: mod_base = OTHER; note = 2'-O-methyl modified nucleotide with phosphorothioate linkage
  modified_base 16: mod_base = OTHER; note = 2'-fluoro modified nucleotide with phosphorothioate linkage
  modified_base 17: mod_base = OTHER; note = 2'-O-methyl modified nucleotide with phosphorothioate linkage
  modified_base 18: mod_base = OTHER; note = 2'-fluoro modified nucleotide with phosphorothioate linkage
  modified_base 19: mod_base = OTHER; note = 2'-O-methyl modified nucleotide with phosphorothioate linkage
  modified_base 20: mod_base = OTHER; note = 2'-O-methyl modified nucleotide
  modified_base 21: mod_base = OTHER; note = 2'-fluoro modified nucleotide
  modified_base 22: mod_base = OTHER; note = 2'-O-methyl modified nucleotide
  modified_base 23: mod_base = OTHER; note = 2'-fluoro modified nucleotide
  modified_base 24: mod_base = OTHER; note = 2'-O-methyl modified nucleotide
  modified_base 25: mod_base = OTHER; note = 2'-fluoro modified nucleotide
  modified_base 26: mod_base = OTHER; note = 2'-O-methyl modified nucleotide
  modified_base 27: mod_base = OTHER; note = 2'-fluoro modified nucleotide
  modified_base 28: mod_base = OTHER; note = 2'-O-methyl modified nucleotide
  modified_base 29: mod_base = OTHER; note = 2'-fluoro modified nucleotide
  modified_base 30: mod_base = OTHER; note = 2'-O-methyl modified nucleotide
  modified_base 31: mod_base = OTHER; note = 2'-fluoro modified nucleotide with phosphorothioate linkage
  modified_base 32: mod_base = OTHER; note = 2'-O-methyl modified nucleotide with phosphorothioate linkage
  modified_base 33: mod_base = OTHER; note = 2'-fluoro trivalent N-acetylgalactosamine modified nucleotide
ncggaatcgtacacaaagggtgtacgattccga

SEQ ID NO: 2043 - RNA, 33 nt, synthetic construct
  source 1..33: mol_type = other RNA
  misc_difference 1: note = 2'-O-methyl modified nucleotide with phosphorothioate linkage may be 5' phosphate modified
  modified_base 2: mod_base = OTHER; note = 2'-fluoro modified nucleotide with phosphorothioate linkage
  modified_base 3: mod_base = OTHER; note = 2'-O-methyl modified nucleotide
  modified_base 4: mod_base = OTHER; note = 2'-fluoro modified nucleotide
  modified_base 5: mod_base = OTHER; note = 2'-O-methyl modified nucleotide
  modified_base 6: mod_base = OTHER; note = 2'-fluoro modified nucleotide
  modified_base 7: mod_base = OTHER; note = 2'-O-methyl modified nucleotide
  modified_base 8: mod_base = OTHER; note = 2'-fluoro modified nucleotide
  modified_base 9: mod_base = OTHER; note = 2'-O-methyl modified nucleotide
  modified_base 10: mod_base = OTHER; note = 2'-fluoro modified nucleotide
  modified_base 11: mod_base = OTHER; note = 2'-O-methyl modified nucleotide
  modified_base 12: mod_base = OTHER; note = 2'-fluoro modified nucleotide
  modified_base 13: mod_base = OTHER; note = 2'-O-methyl modified nucleotide
  modified_base 14: mod_base = OTHER; note = 2'-fluoro modified nucleotide with phosphorothioate linkage
  modified_base 15: mod_base = OTHER; note = 2'-O-methyl modified nucleotide with phosphorothioate linkage
  modified_base 16: mod_base = OTHER; note = 2'-fluoro modified nucleotide with phosphorothioate linkage
  modified_base 17: mod_base = OTHER; note = 2'-O-methyl modified nucleotide with phosphorothioate linkage
  modified_base 18: mod_base = OTHER; note = 2'-fluoro modified nucleotide with phosphorothioate linkage
  modified_base 19: mod_base = OTHER; note = 2'-O-methyl modified nucleotide with phosphorothioate linkage
  modified_base 20: mod_base = OTHER; note = 2'-O-methyl modified nucleotide
  modified_base 21: mod_base = OTHER; note = 2'-fluoro modified nucleotide
  modified_base 22: mod_base = OTHER; note = 2'-O-methyl modified nucleotide
  modified_base 23: mod_base = OTHER; note = 2'-fluoro modified nucleotide
  modified_base 24: mod_base = OTHER; note = 2'-O-methyl modified nucleotide
  modified_base 25: mod_base = OTHER; note = 2'-fluoro modified nucleotide
  modified_base 26: mod_base = OTHER; note = 2'-O-methyl modified nucleotide
  modified_base 27: mod_base = OTHER; note = 2'-fluoro modified nucleotide
  modified_base 28: mod_base = OTHER; note = 2'-O-methyl modified nucleotide
  modified_base 29: mod_base = OTHER; note = 2'-fluoro modified nucleotide
  modified_base 30: mod_base = OTHER; note = 2'-O-methyl modified nucleotide
  modified_base 31: mod_base = OTHER; note = 2'-fluoro modified nucleotide with phosphorothioate linkage
  modified_base 32: mod_base = OTHER; note = 2'-O-methyl modified nucleotide with phosphorothioate linkage
  modified_base 33: mod_base = OTHER; note = 2'-fluoro trivalent N-acetylgalactosamine modified nucleotide
natacctctgctcttctgaagagcagaggtata

SEQ ID NO: 2044 - RNA, 33 nt, synthetic construct
  source 1..33: mol_type = other RNA
  misc_difference 1: note = 2'-O-methyl modified nucleotide with phosphorothioate linkage may be 5' phosphate modified
  modified_base 2: mod_base = OTHER; note = 2'-fluoro modified nucleotide with phosphorothioate linkage
  modified_base 3: mod_base = OTHER; note = 2'-O-methyl modified nucleotide
  modified_base 4: mod_base = OTHER; note = 2'-fluoro modified nucleotide
  modified_base 5: mod_base = OTHER; note = 2'-O-methyl modified nucleotide
  modified_base 6: mod_base = OTHER; note = 2'-fluoro modified nucleotide
  modified_base 7: mod_base = OTHER; note = 2'-O-methyl modified nucleotide
  modified_base 8: mod_base = OTHER; note = 2'-fluoro modified nucleotide
  modified_base 9: mod_base = OTHER; note = 2'-O-methyl modified nucleotide
  modified_base 10: mod_base = OTHER; note = 2'-fluoro modified nucleotide
  modified_base 11: mod_base = OTHER; note = 2'-O-methyl modified nucleotide
  modified_base 12: mod_base = OTHER; note = 2'-fluoro modified nucleotide
  modified_base 13: mod_base = OTHER; note = 2'-O-methyl modified nucleotide
  modified_base 14: mod_base = OTHER; note = 2'-fluoro modified nucleotide with phosphorothioate linkage
  modified_base 15: mod_base = OTHER; note = 2'-O-methyl modified nucleotide with phosphorothioate linkage
  modified_base 16: mod_base = OTHER; note = 2'-fluoro modified nucleotide with phosphorothioate linkage
  modified_base 17: mod_base = OTHER; note = 2'-O-methyl modified nucleotide with phosphorothioate linkage
  modified_base 18: mod_base = OTHER; note = 2'-fluoro modified nucleotide with phosphorothioate linkage
  modified_base 19: mod_base = OTHER; note = 2'-O-methyl modified nucleotide with phosphorothioate linkage
  modified_base 20: mod_base = OTHER; note = 2'-O-methyl modified nucleotide
  modified_base 21: mod_base = OTHER; note = 2'-fluoro modified nucleotide
  modified_base 22: mod_base = OTHER; note = 2'-O-methyl modified nucleotide
  modified_base 23: mod_base = OTHER; note = 2'-fluoro modified nucleotide
  modified_base 24: mod_base = OTHER; note = 2'-O-methyl modified nucleotide
  modified_base 25: mod_base = OTHER; note = 2'-fluoro modified nucleotide
  modified_base 26: mod_base = OTHER; note = 2'-O-methyl modified nucleotide
  modified_base 27: mod_base = OTHER; note = 2'-fluoro modified nucleotide
  modified_base 28: mod_base = OTHER; note = 2'-O-methyl modified nucleotide
  modified_base 29: mod_base = OTHER; note = 2'-fluoro modified nucleotide
  modified_base 30: mod_base = OTHER; note = 2'-O-methyl modified nucleotide
  modified_base 31: mod_base = OTHER; note = 2'-fluoro modified nucleotide with phosphorothioate linkage
  modified_base 32: mod_base = OTHER; note = 2'-O-methyl modified nucleotide with phosphorothioate linkage
  modified_base 33: mod_base = OTHER; note = 2'-fluoro trivalent N-acetylgalactosamine modified nucleotide
natcaatttcttctaccatagaagaaattgata

SEQ ID NO: 2045 - RNA, 33 nt, synthetic construct
  source 1..33: mol_type = other RNA
  misc_difference 1: note = 2'-O-methyl modified nucleotide with phosphorothioate linkage may be 5' phosphate modified
  modified_base 2: mod_base = OTHER; note = 2'-fluoro modified nucleotide with phosphorothioate linkage
  modified_base 3: mod_base = OTHER; note = 2'-O-methyl modified nucleotide
  modified_base 4: mod_base = OTHER; note = 2'-fluoro modified nucleotide
  modified_base 5: mod_base = OTHER; note = 2'-O-methyl modified nucleotide
  modified_base 6: mod_base = OTHER; note = 2'-fluoro modified nucleotide
  modified_base 7: mod_base = OTHER; note = 2'-O-methyl modified nucleotide
  modified_base 8: mod_base = OTHER; note = 2'-fluoro modified nucleotide
  modified_base 9: mod_base = OTHER; note = 2'-O-methyl modified nucleotide
  modified_base 10: mod_base = OTHER; note = 2'-fluoro modified nucleotide
  modified_base 11: mod_base = OTHER; note = 2'-O-methyl modified nucleotide
  modified_base 12: mod_base = OTHER; note = 2'-fluoro modified nucleotide
  modified_base 13: mod_base = OTHER; note = 2'-O-methyl modified nucleotide
  modified_base 14: mod_base = OTHER; note = 2'-fluoro modified nucleotide with phosphorothioate linkage
  modified_base 15: mod_base = OTHER; note = 2'-O-methyl modified nucleotide with phosphorothioate linkage
  modified_base 16: mod_base = OTHER; note = 2'-fluoro modified nucleotide with phosphorothioate linkage
  modified_base 17: mod_base = OTHER; note = 2'-O-methyl modified nucleotide with phosphorothioate linkage
  modified_base 18: mod_base = OTHER; note = 2'-fluoro modified nucleotide with phosphorothioate linkage
  modified_base 19: mod_base = OTHER; note = 2'-O-methyl modified nucleotide with phosphorothioate linkage
  modified_base 20: mod_base = OTHER; note = 2'-O-methyl modified nucleotide
  modified_base 21: mod_base = OTHER; note = 2'-fluoro modified nucleotide
  modified_base 22: mod_base = OTHER; note = 2'-O-methyl modified nucleotide
  modified_base 23: mod_base = OTHER; note = 2'-fluoro modified nucleotide
  modified_base 24: mod_base = OTHER; note = 2'-O-methyl modified nucleotide
  modified_base 25: mod_base = OTHER; note = 2'-fluoro modified nucleotide
  modified_base 26: mod_base = OTHER; note = 2'-O-methyl modified nucleotide
  modified_base 27: mod_base = OTHER; note = 2'-fluoro modified nucleotide
  modified_base 28: mod_base = OTHER; note = 2'-O-methyl modified nucleotide
  modified_base 29: mod_base = OTHER; note = 2'-fluoro modified nucleotide
  modified_base 30: mod_base = OTHER; note = 2'-O-methyl modified nucleotide
  modified_base 31: mod_base = OTHER; note = 2'-fluoro modified nucleotide with phosphorothioate linkage
  modified_base 32: mod_base = OTHER; note = 2'-O-methyl modified nucleotide with phosphorothioate linkage
  modified_base 33: mod_base = OTHER; note = 2'-fluoro trivalent N-acetylgalactosamine modified nucleotide
naacattgtgttttgcattaaaacacaatgtta

SEQ ID NO: 2046 - RNA, 33 nt, synthetic construct
  source 1..33: mol_type = other RNA
  misc_difference 1: note = 2'-O-methyl modified nucleotide with phosphorothioate linkage may be 5' phosphate modified
  modified_base 2: mod_base = OTHER; note = 2'-fluoro modified nucleotide with phosphorothioate linkage
  modified_base 3: mod_base = OTHER; note = 2'-O-methyl modified nucleotide
  modified_base 4: mod_base = OTHER; note = 2'-fluoro modified nucleotide
  modified_base 5: mod_base = OTHER; note = 2'-O-methyl modified nucleotide
  modified_base 6: mod_base = OTHER; note = 2'-fluoro modified nucleotide
  modified_base 7: mod_base = OTHER; note = 2'-O-methyl modified nucleotide
  modified_base 8: mod_base = OTHER; note = 2'-fluoro modified nucleotide
  modified_base 9: mod_base = OTHER; note = 2'-O-methyl modified nucleotide
  modified_base 10: mod_base = OTHER; note = 2'-fluoro modified nucleotide
  modified_base 11: mod_base = OTHER; note = 2'-O-methyl modified nucleotide
  modified_base 12: mod_base = OTHER; note = 2'-fluoro modified nucleotide
  modified_base 13: mod_base = OTHER; note = 2'-O-methyl modified nucleotide
  modified_base 14: mod_base = OTHER; note = 2'-fluoro modified nucleotide with phosphorothioate linkage
  modified_base 15: mod_base = OTHER; note = 2'-O-methyl modified nucleotide with phosphorothioate linkage
  modified_base 16: mod_base = OTHER; note = 2'-fluoro modified nucleotide with phosphorothioate linkage
  modified_base 17: mod_base = OTHER; note = 2'-O-methyl modified nucleotide with phosphorothioate linkage
  modified_base 18: mod_base = OTHER; note = 2'-fluoro modified nucleotide with phosphorothioate linkage
  modified_base 19: mod_base = OTHER; note = 2'-O-methyl modified nucleotide with phosphorothioate linkage
  modified_base 20: mod_base = OTHER; note = 2'-O-methyl modified nucleotide
  modified_base 21: mod_base = OTHER; note = 2'-fluoro modified nucleotide
  modified_base 22: mod_base = OTHER; note = 2'-O-methyl modified nucleotide
  modified_base 23: mod_base = OTHER; note = 2'-fluoro modified nucleotide
  modified_base 24: mod_base = OTHER; note = 2'-O-methyl modified nucleotide
  modified_base 25: mod_base = OTHER; note = 2'-fluoro modified nucleotide
  modified_base 26: mod_base = OTHER; note = 2'-O-methyl modified nucleotide
  modified_base 27: mod_base = OTHER; note = 2'-fluoro modified nucleotide
  modified_base 28: mod_base = OTHER; note = 2'-O-methyl modified nucleotide
  modified_base 29: mod_base = OTHER; note = 2'-fluoro modified nucleotide
  modified_base 30: mod_base = OTHER; note = 2'-O-methyl modified nucleotide
  modified_base 31: mod_base = OTHER; note = 2'-fluoro modified nucleotide with phosphorothioate linkage
  modified_base 32: mod_base = OTHER; note = 2'-O-methyl modified nucleotide with phosphorothioate linkage
  modified_base 33: mod_base = OTHER; note = 2'-fluoro trivalent N-acetylgalactosamine modified nucleotide
naactttataagcatatgctgcttataaagtta

SEQ ID NO: 2047 - RNA, 33 nt, synthetic construct
  source 1..33: mol_type = other RNA
  misc_difference 1: note = 2'-O-methyl modified nucleotide with phosphorothioate linkage may be 5' phosphate modified
  modified_base 2: mod_base = OTHER; note = 2'-fluoro modified nucleotide with phosphorothioate linkage
  modified_base 3: mod_base = OTHER; note = 2'-O-methyl modified nucleotide
  modified_base 4: mod_base = OTHER; note = 2'-fluoro modified nucleotide
  modified_base 5: mod_base = OTHER; note = 2'-O-methyl modified nucleotide
  modified_base 6: mod_base = OTHER; note = 2'-fluoro modified nucleotide
  modified_base 7: mod_base = OTHER; note = 2'-O-methyl modified nucleotide
  modified_base 8: mod_base = OTHER; note = 2'-fluoro modified nucleotide
  modified_base 9: mod_base = OTHER; note = 2'-O-methyl modified nucleotide
  modified_base 10: mod_base = OTHER; note = 2'-fluoro modified nucleotide
  modified_base 11: mod_base = OTHER; note = 2'-O-methyl modified nucleotide
  modified_base 12: mod_base = OTHER; note = 2'-fluoro modified nucleotide
  modified_base 13: mod_base = OTHER; note = 2'-O-methyl modified nucleotide
  modified_base 14: mod_base = OTHER; note = 2'-fluoro modified nucleotide with phosphorothioate linkage
  modified_base 15: mod_base = OTHER; note = 2'-O-methyl modified nucleotide with phosphorothioate linkage
  modified_base 16: mod_base = OTHER; note = 2'-fluoro modified nucleotide with phosphorothioate linkage
  modified_base 17: mod_base = OTHER; note = 2'-O-methyl modified nucleotide with phosphorothioate linkage
  modified_base 18: mod_base = OTHER; note = 2'-fluoro modified nucleotide with phosphorothioate linkage
  modified_base 19: mod_base = OTHER; note = 2'-O-methyl modified nucleotide with phosphorothioate linkage
  modified_base 20: mod_base = OTHER; note = 2'-O-methyl modified nucleotide
  modified_base 21: mod_base = OTHER; note = 2'-fluoro modified nucleotide
  modified_base 22: mod_base = OTHER; note = 2'-O-methyl modified nucleotide
  modified_base 23: mod_base = OTHER; note = 2'-fluoro modified nucleotide
  modified_base 24: mod_base = OTHER; note = 2'-O-methyl modified nucleotide
  modified_base 25: mod_base = OTHER; note = 2'-fluoro modified nucleotide
  modified_base 26: mod_base = OTHER; note = 2'-O-methyl modified nucleotide
  modified_base 27: mod_base = OTHER; note = 2'-fluoro modified nucleotide
  modified_base 28: mod_base = OTHER; note = 2'-O-methyl modified nucleotide
  modified_base 29: mod_base = OTHER; note = 2'-fluoro modified nucleotide
  modified_base 30: mod_base = OTHER; note = 2'-O-methyl modified nucleotide
  modified_base 31: mod_base = OTHER; note = 2'-fluoro modified nucleotide with phosphorothioate linkage
  modified_base 32: mod_base = OTHER; note = 2'-O-methyl modified nucleotide with phosphorothioate linkage
  modified_base 33: mod_base = OTHER; note = 2'-fluoro trivalent N-acetylgalactosamine modified nucleotide
naggataacttttaatagataaaagttatccta

SEQ ID NO: 2048 - RNA, 33 nt, synthetic construct
  source 1..33: mol_type = other RNA
  misc_difference 1: note = 2'-O-methyl modified nucleotide with phosphorothioate linkage may be 5' phosphate modified
  modified_base 2: mod_base = OTHER; note = 2'-fluoro modified nucleotide with phosphorothioate linkage
  modified_base 3: mod_base = OTHER; note = 2'-O-methyl modified nucleotide
  modified_base 4: mod_base = OTHER; note = 2'-fluoro modified nucleotide
  modified_base 5: mod_base = OTHER; note = 2'-O-methyl modified nucleotide
  modified_base 6: mod_base = OTHER; note = 2'-fluoro modified nucleotide
  modified_base 7: mod_base = OTHER; note = 2'-O-methyl modified nucleotide
  modified_base 8: mod_base = OTHER; note = 2'-fluoro modified nucleotide
  modified_base 9: mod_base = OTHER; note = 2'-O-methyl modified nucleotide
  modified_base 10: mod_base = OTHER; note = 2'-fluoro modified nucleotide
  modified_base 11: mod_base = OTHER; note = 2'-O-methyl modified nucleotide
  modified_base 12: mod_base = OTHER; note = 2'-fluoro modified nucleotide
  modified_base 13: mod_base = OTHER; note = 2'-O-methyl modified nucleotide
  modified_base 14: mod_base = OTHER; note = 2'-fluoro modified nucleotide with phosphorothioate linkage
  modified_base 15: mod_base = OTHER; note = 2'-O-methyl modified nucleotide with phosphorothioate linkage
  modified_base 16: mod_base = OTHER; note = 2'-fluoro modified nucleotide with phosphorothioate linkage
  modified_base 17: mod_base = OTHER; note = 2'-O-methyl modified nucleotide with phosphorothioate linkage
  modified_base 18: mod_base = OTHER; note = 2'-fluoro modified nucleotide with phosphorothioate linkage
  modified_base 19: mod_base = OTHER; note = 2'-O-methyl modified nucleotide with phosphorothioate linkage
  modified_base 20: mod_base = OTHER; note = 2'-O-methyl modified nucleotide
  modified_base 21: mod_base = OTHER; note = 2'-fluoro modified nucleotide
  modified_base 22: mod_base = OTHER; note = 2'-O-methyl modified nucleotide
  modified_base 23: mod_base = OTHER; note = 2'-fluoro modified nucleotide
  modified_base 24: mod_base = OTHER; note = 2'-O-methyl modified nucleotide
  modified_base 25: mod_base = OTHER; note = 2'-fluoro modified nucleotide
  modified_base 26: mod_base = OTHER; note = 2'-O-methyl modified nucleotide
  modified_base 27: mod_base = OTHER; note = 2'-fluoro modified nucleotide
  modified_base 28: mod_base = OTHER; note = 2'-O-methyl modified nucleotide
  modified_base 29: mod_base = OTHER; note = 2'-fluoro modified nucleotide
  modified_base 30: mod_base = OTHER; note = 2'-O-methyl modified nucleotide
  modified_base 31: mod_base = OTHER; note = 2'-fluoro modified nucleotide with phosphorothioate linkage
  modified_base 32: mod_base = OTHER; note = 2'-O-methyl modified nucleotide with phosphorothioate linkage
  modified_base 33: mod_base = OTHER; note = 2'-fluoro trivalent N-acetylgalactosamine modified nucleotide
ntttattggttgatactgtatcaaccaataaaa

SEQ ID NO: 2049 - RNA, 33 nt, synthetic construct
  source 1..33: mol_type = other RNA
  misc_difference 1: note = 2'-O-methyl modified nucleotide with phosphorothioate linkage may be 5' phosphate modified
  modified_base 2: mod_base = OTHER; note = 2'-fluoro modified nucleotide with phosphorothioate linkage
  modified_base 3: mod_base = OTHER; note = 2'-O-methyl modified nucleotide
  modified_base 4: mod_base = OTHER; note = 2'-fluoro modified nucleotide
  modified_base 5: mod_base = OTHER; note = 2'-O-methyl modified nucleotide
  modified_base 6: mod_base = OTHER; note = 2'-fluoro modified nucleotide
  modified_base 7: mod_base = OTHER; note = 2'-O-methyl modified nucleotide
  modified_base 8: mod_base = OTHER; note = 2'-fluoro modified nucleotide
  modified_base 9: mod_base = OTHER; note = 2'-O-methyl modified nucleotide
  modified_base 10: mod_base = OTHER; note = 2'-fluoro modified nucleotide
  modified_base 11: mod_base = OTHER; note = 2'-O-methyl modified nucleotide
  modified_base 12: mod_base = OTHER; note = 2'-fluoro modified nucleotide
  modified_base 13: mod_base = OTHER; note = 2'-O-methyl modified nucleotide
  modified_base 14: mod_base = OTHER; note = 2'-fluoro modified nucleotide with phosphorothioate linkage
  modified_base 15: mod_base = OTHER; note = 2'-O-methyl modified nucleotide with phosphorothioate linkage
  modified_base 16: mod_base = OTHER; note = 2'-fluoro modified nucleotide with phosphorothioate linkage
  modified_base 17: mod_base = OTHER; note = 2'-O-methyl modified nucleotide with phosphorothioate linkage
  modified_base 18: mod_base = OTHER; note = 2'-fluoro modified nucleotide with phosphorothioate linkage
  modified_base 19: mod_base = OTHER; note = 2'-O-methyl modified nucleotide with phosphorothioate linkage
  modified_base 20: mod_base = OTHER; note = 2'-O-methyl modified nucleotide
  modified_base 21: mod_base = OTHER; note = 2'-fluoro modified nucleotide
  modified_base 22: mod_base = OTHER; note = 2'-O-methyl modified nucleotide
  modified_base 23: mod_base = OTHER; note = 2'-fluoro modified nucleotide
  modified_base 24: mod_base = OTHER; note = 2'-O-methyl modified nucleotide
  modified_base 25: mod_base = OTHER; note = 2'-fluoro modified nucleotide
  modified_base 26: mod_base = OTHER; note = 2'-O-methyl modified nucleotide
  modified_base 27: mod_base = OTHER; note = 2'-fluoro modified nucleotide
  modified_base 28: mod_base = OTHER; note = 2'-O-methyl modified nucleotide
  modified_base 29: mod_base = OTHER; note = 2'-fluoro modified nucleotide
  modified_base 30: mod_base = OTHER; note = 2'-O-methyl modified nucleotide
  modified_base 31: mod_base = OTHER; note = 2'-fluoro modified nucleotide with phosphorothioate linkage
  modified_base 32: mod_base = OTHER; note = 2'-O-methyl modified nucleotide with phosphorothioate linkage
  modified_base 33: mod_base = OTHER; note = 2'-fluoro trivalent N-acetylgalactosamine modified nucleotide
ngcaactgttttcttctggagaaaacagttgca

SEQ ID NO: 2050 - RNA, 33 nt, synthetic construct
  source 1..33: mol_type = other RNA
  misc_difference 1: note = 2'-O-methyl modified nucleotide with phosphorothioate linkage may be 5' phosphate modified
  modified_base 2: mod_base = OTHER; note = 2'-fluoro modified nucleotide with phosphorothioate linkage
  modified_base 3: mod_base = OTHER; note = 2'-O-methyl modified nucleotide
  modified_base 4: mod_base = OTHER; note = 2'-fluoro modified nucleotide
  modified_base 5: mod_base = OTHER; note = 2'-O-methyl modified nucleotide
  modified_base 6: mod_base = OTHER; note = 2'-fluoro modified nucleotide
  modified_base 7: mod_base = OTHER; note = 2'-O-methyl modified nucleotide
  modified_base 8: mod_base = OTHER; note = 2'-fluoro modified nucleotide
  modified_base 9: mod_base = OTHER; note = 2'-O-methyl modified nucleotide
  modified_base 10: mod_base = OTHER; note = 2'-fluoro modified nucleotide
  modified_base 11: mod_base = OTHER; note = 2'-O-methyl modified nucleotide
  modified_base 12: mod_base = OTHER; note = 2'-fluoro modified nucleotide
  modified_base 13: mod_base = OTHER; note = 2'-O-methyl modified nucleotide
  modified_base 14: mod_base = OTHER; note = 2'-fluoro modified nucleotide with phosphorothioate linkage
  modified_base 15: mod_base = OTHER; note = 2'-O-methyl modified nucleotide with phosphorothioate linkage
  modified_base 16: mod_base = OTHER; note = 2'-fluoro modified nucleotide with phosphorothioate linkage
  modified_base 17: mod_base = OTHER; note = 2'-O-methyl modified nucleotide with phosphorothioate linkage
  modified_base 18: mod_base = OTHER; note = 2'-fluoro modified nucleotide with phosphorothioate linkage
  modified_base 19: mod_base = OTHER; note = 2'-O-methyl modified nucleotide with phosphorothioate linkage
  modified_base 20: mod_base = OTHER; note = 2'-O-methyl modified nucleotide
  modified_base 21: mod_base = OTHER; note = 2'-fluoro modified nucleotide
  modified_base 22: mod_base = OTHER; note = 2'-O-methyl modified nucleotide
  modified_base 23: mod_base = OTHER; note = 2'-fluoro modified nucleotide
  modified_base 24: mod_base = OTHER; note = 2'-O-methyl modified nucleotide
  modified_base 25: mod_base = OTHER; note = 2'-fluoro modified nucleotide
  modified_base 26: mod_base = OTHER; note = 2'-O-methyl modified nucleotide
  modified_base 27: mod_base = OTHER; note = 2'-fluoro modified nucleotide
  modified_base 28: mod_base = OTHER; note = 2'-O-methyl modified nucleotide
  modified_base 29: mod_base = OTHER; note = 2'-fluoro modified nucleotide
  modified_base 30: mod_base = OTHER; note = 2'-O-methyl modified nucleotide
  modified_base 31: mod_base = OTHER; note = 2'-fluoro modified nucleotide with phosphorothioate linkage
  modified_base 32: mod_base = OTHER; note = 2'-O-methyl modified nucleotide with phosphorothioate linkage
  modified_base 33: mod_base = OTHER; note = 2'-fluoro trivalent N-acetylgalactosamine modified nucleotide
ngctttgatacaacttccagttgtatcaaagca

SEQ ID NO: 2051 - RNA, 33 nt, synthetic construct
  source 1..33: mol_type = other RNA
  misc_difference 1: note = 2'-O-methyl modified nucleotide with phosphorothioate linkage may be 5' phosphate modified
  modified_base 2: mod_base = OTHER; note = 2'-fluoro modified nucleotide with phosphorothioate linkage
  modified_base 3: mod_base = OTHER; note = 2'-O-methyl modified nucleotide
  modified_base 4: mod_base = OTHER; note = 2'-fluoro modified nucleotide
  modified_base 5: mod_base = OTHER; note = 2'-O-methyl modified nucleotide
  modified_base 6: mod_base = OTHER; note = 2'-fluoro modified nucleotide
  modified_base 7: mod_base = OTHER; note = 2'-O-methyl modified nucleotide
  modified_base 8: mod_base = OTHER; note = 2'-fluoro modified nucleotide
  modified_base 9: mod_base = OTHER; note = 2'-O-methyl modified nucleotide
  modified_base 10: mod_base = OTHER; note = 2'-fluoro modified nucleotide
  modified_base 11: mod_base = OTHER; note = 2'-O-methyl modified nucleotide
  modified_base 12: mod_base = OTHER; note = 2'-fluoro modified nucleotide
  modified_base 13: mod_base = OTHER; note = 2'-O-methyl modified nucleotide
  modified_base 14: mod_base = OTHER; note = 2'-fluoro modified nucleotide with phosphorothioate linkage
  modified_base 15: mod_base = OTHER; note = 2'-O-methyl modified nucleotide with phosphorothioate linkage
  modified_base 16: mod_base = OTHER; note = 2'-fluoro modified nucleotide with phosphorothioate linkage
  modified_base 17: mod_base = OTHER; note = 2'-O-methyl modified nucleotide with phosphorothioate linkage
  modified_base 18: mod_base = OTHER; note = 2'-fluoro modified nucleotide with phosphorothioate linkage
  modified_base 19: mod_base = OTHER; note = 2'-O-methyl modified nucleotide with phosphorothioate linkage
  modified_base 20: mod_base = OTHER; note = 2'-O-methyl modified nucleotide
  modified_base 21: mod_base = OTHER; note = 2'-fluoro modified nucleotide
  modified_base 22: mod_base = OTHER; note = 2'-O-methyl modified nucleotide
  modified_base 23: mod_base = OTHER; note = 2'-fluoro modified nucleotide
  modified_base 24: mod_base = OTHER; note = 2'-O-methyl modified nucleotide
  modified_base 25: mod_base = OTHER; note = 2'-fluoro modified nucleotide
  modified_base 26: mod_base = OTHER; note = 2'-O-methyl modified nucleotide
  modified_base 27: mod_base = OTHER; note = 2'-fluoro modified nucleotide
  modified_base 28: mod_base = OTHER; note = 2'-O-methyl modified nucleotide
  modified_base 29: mod_base = OTHER; note = 2'-fluoro modified nucleotide
  modified_base 30: mod_base = OTHER; note = 2'-O-methyl modified nucleotide
  modified_base 31: mod_base = OTHER; note = 2'-fluoro modified nucleotide with phosphorothioate linkage
  modified_base 32: mod_base = OTHER; note = 2'-O-methyl modified nucleotide with phosphorothioate linkage
  modified_base 33: mod_base = OTHER; note = 2'-fluoro trivalent N-acetylgalactosamine modified nucleotide
ncaaagcttctctcttcaagagagaagctttga

SEQ ID NO: 2052 - RNA, 33 nt, synthetic construct
  source 1..33: mol_type = other RNA
  misc_difference 1: note = 2'-O-methyl modified nucleotide with phosphorothioate linkage may be 5' phosphate modified
  modified_base 2: mod_base = OTHER; note = 2'-fluoro modified nucleotide with phosphorothioate linkage
  modified_base 3: mod_base = OTHER; note = 2'-O-methyl modified nucleotide
  modified_base 4: mod_base = OTHER; note = 2'-fluoro modified nucleotide
  modified_base 5: mod_base = OTHER; note = 2'-O-methyl modified nucleotide
  modified_base 6: mod_base = OTHER; note = 2'-fluoro modified nucleotide
  modified_base 7: mod_base = OTHER; note = 2'-O-methyl modified nucleotide
  modified_base 8: mod_base = OTHER; note = 2'-fluoro modified nucleotide
  modified_base 9: mod_base = OTHER; note = 2'-O-methyl modified nucleotide
  modified_base 10: mod_base = OTHER; note = 2'-fluoro modified nucleotide
  modified_base 11: mod_base = OTHER; note = 2'-O-methyl modified nucleotide
  modified_base 12: mod_base = OTHER; note = 2'-fluoro modified nucleotide
  modified_base 13: mod_base = OTHER; note = 2'-O-methyl modified nucleotide
  modified_base 14: mod_base = OTHER; note = 2'-fluoro modified nucleotide with phosphorothioate linkage
  modified_base 15: mod_base = OTHER; note = 2'-O-methyl modified nucleotide with phosphorothioate linkage
  modified_base 16: mod_base = OTHER; note = 2'-fluoro modified nucleotide with phosphorothioate linkage
  modified_base 17: mod_base = OTHER; note = 2'-O-methyl modified nucleotide with phosphorothioate linkage
  modified_base 18: mod_base = OTHER; note = 2'-fluoro modified nucleotide with phosphorothioate linkage
  modified_base 19: mod_base = OTHER; note = 2'-O-methyl modified nucleotide with phosphorothioate linkage
  modified_base 20: mod_base = OTHER; note = 2'-O-methyl modified nucleotide
  modified_base 21: mod_base = OTHER; note = 2'-fluoro modified nucleotide
  modified_base 22: mod_base = OTHER; note = 2'-O-methyl modified nucleotide
  modified_base 23: mod_base = OTHER; note = 2'-fluoro modified nucleotide
  modified_base 24: mod_base = OTHER; note = 2'-O-methyl modified nucleotide
  modified_base 25: mod_base = OTHER; note = 2'-fluoro modified nucleotide
  modified_base 26: mod_base = OTHER; note = 2'-O-methyl modified nucleotide
  modified_base 27: mod_base = OTHER; note = 2'-fluoro modified nucleotide
  modified_base 28: mod_base = OTHER; note = 2'-O-methyl modified nucleotide
  modified_base 29: mod_base = OTHER; note = 2'-fluoro modified nucleotide
  modified_base 30: mod_base = OTHER; note = 2'-O-methyl modified nucleotide
  modified_base 31: mod_base = OTHER; note = 2'-fluoro modified nucleotide with phosphorothioate linkage
  modified_base 32: mod_base = OTHER; note = 2'-O-methyl modified nucleotide with phosphorothioate linkage
  modified_base 33: mod_base = OTHER; note = 2'-fluoro trivalent N-acetylgalactosamine modified nucleotide
nggaactcctttcgtctgccgaaaggagttcca

SEQ ID NO: 2053 - RNA, 33 nt, synthetic construct
  source 1..33: mol_type = other RNA
  misc_difference 1: note = 2'-O-methyl modified nucleotide with phosphorothioate linkage may be 5' phosphate modified
  modified_base 2: mod_base = OTHER; note = 2'-fluoro modified nucleotide with phosphorothioate linkage
  modified_base 3: mod_base = OTHER; note = 2'-O-methyl modified nucleotide
  modified_base 4: mod_base = OTHER; note = 2'-fluoro modified nucleotide
  modified_base 5: mod_base = OTHER; note = 2'-O-methyl modified nucleotide
  modified_base 6: mod_base = OTHER; note = 2'-fluoro modified nucleotide
  modified_base 7: mod_base = OTHER; note = 2'-O-methyl modified nucleotide
  modified_base 8: mod_base = OTHER; note = 2'-fluoro modified nucleotide
  modified_base 9: mod_base = OTHER; note = 2'-O-methyl modified nucleotide
  modified_base 10: mod_base = OTHER; note = 2'-fluoro modified nucleotide
  modified_base 11: mod_base = OTHER; note = 2'-O-methyl modified nucleotide
  modified_base 12: mod_base = OTHER; note = 2'-fluoro modified nucleotide
  modified_base 13: mod_base = OTHER; note = 2'-O-methyl modified nucleotide
  modified_base 14: mod_base = OTHER; note = 2'-fluoro modified nucleotide with phosphorothioate linkage
  modified_base 15: mod_base = OTHER; note = 2'-O-methyl modified nucleotide with phosphorothioate linkage
  modified_base 16: mod_base = OTHER; note = 2'-fluoro modified nucleotide with phosphorothioate linkage
  modified_base 17: mod_base = OTHER; note = 2'-O-methyl modified nucleotide with phosphorothioate linkage
  modified_base 18: mod_base = OTHER; note = 2'-fluoro modified nucleotide with phosphorothioate linkage
  modified_base 19: mod_base = OTHER; note = 2'-O-methyl modified nucleotide with phosphorothioate linkage
  modified_base 20: mod_base = OTHER; note = 2'-O-methyl modified nucleotide
  modified_base 21: mod_base = OTHER; note = 2'-fluoro modified nucleotide
  modified_base 22: mod_base = OTHER; note = 2'-O-methyl modified nucleotide
  modified_base 23: mod_base = OTHER; note = 2'-fluoro modified nucleotide
  modified_base 24: mod_base = OTHER; note = 2'-O-methyl modified nucleotide
  modified_base 25: mod_base = OTHER; note = 2'-fluoro modified nucleotide
  modified_base 26: mod_base = OTHER; note = 2'-O-methyl modified nucleotide
  modified_base 27: mod_base = OTHER; note = 2'-fluoro modified nucleotide
  modified_base 28: mod_base = OTHER; note = 2'-O-methyl modified nucleotide
  modified_base 29: mod_base = OTHER; note = 2'-fluoro modified nucleotide
  modified_base 30: mod_base = OTHER; note = 2'-O-methyl modified nucleotide
  modified_base 31: mod_base = OTHER; note = 2'-fluoro modified nucleotide with phosphorothioate linkage
  modified_base 32: mod_base = OTHER; note = 2'-O-methyl modified nucleotide with phosphorothioate linkage
  modified_base 33: mod_base = OTHER; note = 2'-fluoro trivalent N-acetylgalactosamine modified nucleotide
natgacagttctttgactgaaagaactgtcata

SEQ ID NO: 2054 - RNA, 33 nt, synthetic construct
  source 1..33: mol_type = other RNA
  misc_difference 1: note = 2'-O-methyl modified nucleotide with phosphorothioate linkage may be 5' phosphate modified
  modified_base 2: mod_base = OTHER; note = 2'-fluoro modified nucleotide with phosphorothioate linkage
  modified_base 3: mod_base = OTHER; note = 2'-O-methyl modified nucleotide
  modified_base 4: mod_base = OTHER; note = 2'-fluoro modified nucleotide
  modified_base 5: mod_base = OTHER; note = 2'-O-methyl modified nucleotide
  modified_base 6: mod_base = OTHER; note = 2'-fluoro modified nucleotide
  modified_base 7: mod_base = OTHER; note = 2'-O-methyl modified nucleotide
  modified_base 8: mod_base = OTHER; note = 2'-fluoro modified nucleotide
  modified_base 9: mod_base = OTHER; note = 2'-O-methyl modified nucleotide
  modified_base 10: mod_base = OTHER; note = 2'-fluoro modified nucleotide
  modified_base 11: mod_base = OTHER; note = 2'-O-methyl modified nucleotide
  modified_base 12: mod_base = OTHER; note = 2'-fluoro modified nucleotide
  modified_base 13: mod_base = OTHER; note = 2'-O-methyl modified nucleotide
  modified_base 14: mod_base = OTHER; note = 2'-fluoro modified nucleotide with phosphorothioate linkage
  modified_base 15: mod_base = OTHER; note = 2'-O-methyl modified nucleotide with phosphorothioate linkage
  modified_base 16: mod_base = OTHER; note = 2'-fluoro modified nucleotide with phosphorothioate linkage
  modified_base 17: mod_base = OTHER; note = 2'-O-methyl modified nucleotide with phosphorothioate linkage
  modified_base 18: mod_base = OTHER; note = 2'-fluoro modified nucleotide with phosphorothioate linkage
  modified_base 19: mod_base = OTHER; note = 2'-O-methyl modified nucleotide with phosphorothioate linkage
  modified_base 20: mod_base = OTHER; note = 2'-O-methyl modified nucleotide
  modified_base 21: mod_base = OTHER; note = 2'-fluoro modified nucleotide
  modified_base 22: mod_base = OTHER; note = 2'-O-methyl modified nucleotide
  modified_base 23: mod_base = OTHER; note = 2'-fluoro modified nucleotide
  modified_base 24: mod_base = OTHER; note = 2'-O-methyl modified nucleotide
  modified_base 25: mod_base = OTHER; note = 2'-fluoro modified nucleotide
  modified_base 26: mod_base = OTHER; note = 2'-O-methyl modified nucleotide
  modified_base 27: mod_base = OTHER; note = 2'-fluoro modified nucleotide
  modified_base 28: mod_base = OTHER; note = 2'-O-methyl modified nucleotide
  modified_base 29: mod_base = OTHER; note = 2'-fluoro modified nucleotide
  modified_base 30: mod_base = OTHER; note = 2'-O-methyl modified nucleotide
  modified_base 31: mod_base = OTHER; note = 2'-fluoro modified nucleotide with phosphorothioate linkage
  modified_base 32: mod_base = OTHER; note = 2'-O-methyl modified nucleotide with phosphorothioate linkage
  modified_base 33: mod_base = OTHER; note = 2'-fluoro trivalent N-acetylgalactosamine modified nucleotide
ntgcagaataacatgtccaatgttattctgcaa

SEQ ID NO: 2055 - RNA, 33 nt, synthetic construct
  source 1..33: mol_type = other RNA
  misc_difference 1: note = 2'-O-methyl modified nucleotide with phosphorothioate linkage may be 5' phosphate modified
  modified_base 2: mod_base = OTHER; note = 2'-fluoro modified nucleotide with phosphorothioate linkage
  modified_base 3: mod_base = OTHER; note = 2'-O-methyl modified nucleotide
  modified_base 4: mod_base = OTHER; note = 2'-fluoro modified nucleotide
  modified_base 5: mod_base = OTHER; note = 2'-O-methyl modified nucleotide
  modified_base 6: mod_base = OTHER; note = 2'-fluoro modified nucleotide
  modified_base 7: mod_base = OTHER; note = 2'-O-methyl modified nucleotide
  modified_base 8: mod_base = OTHER; note = 2'-fluoro modified nucleotide
  modified_base 9: mod_base = OTHER; note = 2'-O-methyl modified nucleotide
  modified_base 10: mod_base = OTHER; note = 2'-fluoro modified nucleotide
  modified_base 11: mod_base = OTHER; note = 2'-O-methyl modified nucleotide
  modified_base 12: mod_base = OTHER; note = 2'-fluoro modified nucleotide
  modified_base 13: mod_base = OTHER; note = 2'-O-methyl modified nucleotide
  modified_base 14: mod_base = OTHER; note = 2'-fluoro modified nucleotide with phosphorothioate linkage
  modified_base 15: mod_base = OTHER; note = 2'-O-methyl modified nucleotide with phosphorothioate linkage
  modified_base 16: mod_base = OTHER; note = 2'-fluoro modified nucleotide with phosphorothioate linkage
  modified_base 17: mod_base = OTHER; note = 2'-O-methyl modified nucleotide with phosphorothioate linkage
  modified_base 18: mod_base = OTHER; note = 2'-fluoro modified nucleotide with phosphorothioate linkage
  modified_base 19: mod_base = OTHER; note = 2'-O-methyl modified nucleotide with phosphorothioate linkage
  modified_base 20: mod_base = OTHER; note = 2'-O-methyl modified nucleotide
  modified_base 21: mod_base = OTHER; note = 2'-fluoro modified nucleotide
  modified_base 22: mod_base = OTHER; note = 2'-O-methyl modified nucleotide
  modified_base 23: mod_base = OTHER; note = 2'-fluoro modified nucleotide
  modified_base 24: mod_base = OTHER; note = 2'-O-methyl modified nucleotide
  modified_base 25: mod_base = OTHER; note = 2'-fluoro modified nucleotide
  modified_base 26: mod_base = OTHER; note = 2'-O-methyl modified nucleotide
  modified_base 27: mod_base = OTHER; note = 2'-fluoro modified nucleotide
  modified_base 28: mod_base = OTHER; note = 2'-O-methyl modified nucleotide
  modified_base 29: mod_base = OTHER; note = 2'-fluoro modified nucleotide
  modified_base 30: mod_base = OTHER; note = 2'-O-methyl modified nucleotide
  modified_base 31: mod_base = OTHER; note = 2'-fluoro modified nucleotide with phosphorothioate linkage
  modified_base 32: mod_base = OTHER; note = 2'-O-methyl modified nucleotide with phosphorothioate linkage
  modified_base 33: mod_base = OTHER; note = 2'-fluoro trivalent N-acetylgalactosamine modified nucleotide
nagaagtcctatagttgtactataggacttcta

SEQ ID NO: 2056 - RNA, 33 nt, synthetic construct
  source 1..33: mol_type = other RNA
  misc_difference 1: note = 2'-O-methyl modified nucleotide with phosphorothioate linkage may be 5' phosphate modified
  modified_base 2: mod_base = OTHER; note = 2'-fluoro modified nucleotide with phosphorothioate linkage
  modified_base 3: mod_base = OTHER; note = 2'-O-methyl modified nucleotide
  modified_base 4: mod_base = OTHER; note = 2'-fluoro modified nucleotide
  modified_base 5: mod_base = OTHER; note = 2'-O-methyl modified nucleotide
  modified_base 6: mod_base = OTHER; note = 2'-fluoro modified nucleotide
  modified_base 7: mod_base = OTHER; note = 2'-O-methyl modified nucleotide
  modified_base 8: mod_base = OTHER; note = 2'-fluoro modified nucleotide
  modified_base 9: mod_base = OTHER; note = 2'-O-methyl modified nucleotide
  modified_base 10: mod_base = OTHER; note = 2'-fluoro modified nucleotide
  modified_base 11: mod_base = OTHER; note = 2'-O-methyl modified nucleotide
  modified_base 12: mod_base = OTHER; note = 2'-fluoro modified nucleotide
  modified_base 13: mod_base = OTHER; note = 2'-O-methyl modified nucleotide
  modified_base 14: mod_base = OTHER; note = 2'-fluoro modified nucleotide with phosphorothioate linkage
  modified_base 15: mod_base = OTHER; note = 2'-O-methyl modified nucleotide with phosphorothioate linkage
  modified_base 16: mod_base = OTHER; note = 2'-fluoro modified nucleotide with phosphorothioate linkage
  modified_base 17: mod_base = OTHER; note = 2'-O-methyl modified nucleotide with phosphorothioate linkage
  modified_base 18: mod_base = OTHER; note = 2'-fluoro modified nucleotide with phosphorothioate linkage
  modified_base 19: mod_base = OTHER; note = 2'-O-methyl modified nucleotide with phosphorothioate linkage
  modified_base 20: mod_base = OTHER; note = 2'-O-methyl modified nucleotide
  modified_base 21: mod_base = OTHER; note = 2'-fluoro modified nucleotide
  modified_base 22: mod_base = OTHER; note = 2'-O-methyl modified nucleotide
  modified_base 23: mod_base = OTHER; note = 2'-fluoro modified nucleotide
  modified_base 24: mod_base = OTHER; note = 2'-O-methyl modified nucleotide
  modified_base 25: mod_base = OTHER; note = 2'-fluoro modified nucleotide
  modified_base 26: mod_base = OTHER; note = 2'-O-methyl modified nucleotide
  modified_base 27: mod_base = OTHER; note = 2'-fluoro modified nucleotide
  modified_base 28: mod_base = OTHER; note = 2'-O-methyl modified nucleotide
  modified_base 29: mod_base = OTHER; note = 2'-fluoro modified nucleotide
  modified_base 30: mod_base = OTHER; note = 2'-O-methyl modified nucleotide
  modified_base 31: mod_base = OTHER; note = 2'-fluoro modified nucleotide with phosphorothioate linkage
  modified_base 32: mod_base = OTHER; note = 2'-O-methyl modified nucleotide with phosphorothioate linkage
  modified_base 33: mod_base = OTHER; note = 2'-fluoro trivalent N-acetylgalactosamine modified nucleotide
nataacttttaatagagattattaaaagttata

SEQ ID NO: 2057 - RNA, 33 nt, synthetic construct
  source 1..33: mol_type = other RNA
  misc_difference 1: note = 2'-O-methyl modified nucleotide with phosphorothioate linkage may be 5' phosphate modified
  modified_base 2: mod_base = OTHER; note = 2'-fluoro modified nucleotide with phosphorothioate linkage
  modified_base 3: mod_base = OTHER; note = 2'-O-methyl modified nucleotide
  modified_base 4: mod_base = OTHER; note = 2'-fluoro modified nucleotide
  modified_base 5: mod_base = OTHER; note = 2'-O-methyl modified nucleotide
  modified_base 6: mod_base = OTHER; note = 2'-fluoro modified nucleotide
  modified_base 7: mod_base = OTHER; note = 2'-O-methyl modified nucleotide
  modified_base 8: mod_base = OTHER; note = 2'-fluoro modified nucleotide
  modified_base 9: mod_base = OTHER; note = 2'-O-methyl modified nucleotide
  modified_base 10: mod_base = OTHER; note = 2'-fluoro modified nucleotide
  modified_base 11: mod_base = OTHER; note = 2'-O-methyl modified nucleotide
  modified_base 12: mod_base = OTHER; note = 2'-fluoro modified nucleotide
  modified_base 13: mod_base = OTHER; note = 2'-O-methyl modified nucleotide
  modified_base 14: mod_base = OTHER; note = 2'-fluoro modified nucleotide with phosphorothioate linkage
  modified_base 15: mod_base = OTHER; note = 2'-O-methyl modified nucleotide with phosphorothioate linkage
  modified_base 16: mod_base = OTHER; note = 2'-fluoro modified nucleotide with phosphorothioate linkage
  modified_base 17: mod_base = OTHER; note = 2'-O-methyl modified nucleotide with phosphorothioate linkage
  modified_base 18: mod_base = OTHER; note = 2'-fluoro modified nucleotide with phosphorothioate linkage
  modified_base 19: mod_base = OTHER; note = 2'-O-methyl modified nucleotide with phosphorothioate linkage
  modified_base 20: mod_base = OTHER; note = 2'-O-methyl modified nucleotide
  modified_base 21: mod_base = OTHER; note = 2'-fluoro modified nucleotide
  modified_base 22: mod_base = OTHER; note = 2'-O-methyl modified nucleotide
  modified_base 23: mod_base = OTHER; note = 2'-fluoro modified nucleotide
  modified_base 24: mod_base = OTHER; note = 2'-O-methyl modified nucleotide
  modified_base 25: mod_base = OTHER; note = 2'-fluoro modified nucleotide
  modified_base 26: mod_base = OTHER; note = 2'-O-methyl modified nucleotide
  modified_base 27: mod_base = OTHER; note = 2'-fluoro modified nucleotide
  modified_base 28: mod_base = OTHER; note = 2'-O-methyl modified nucleotide
  modified_base 29: mod_base = OTHER; note = 2'-fluoro modified nucleotide
  modified_base 30: mod_base = OTHER; note = 2'-O-methyl modified nucleotide
  modified_base 31: mod_base = OTHER; note = 2'-fluoro modified nucleotide with phosphorothioate linkage
  modified_base 32: mod_base = OTHER; note = 2'-O-methyl modified nucleotide with phosphorothioate linkage
  modified_base 33: mod_base = OTHER; note = 2'-fluoro trivalent N-acetylgalactosamine modified nucleotide
nctaagatttcttttccaaaaagaaatcttaga

SEQ ID NO: 2058 - RNA, 33 nt, synthetic construct
  source 1..33: mol_type = other RNA
  misc_difference 1: note = 2'-O-methyl modified nucleotide with phosphorothioate linkage may be 5' phosphate modified
  modified_base 2: mod_base = OTHER; note = 2'-fluoro modified nucleotide with phosphorothioate linkage
  modified_base 3: mod_base = OTHER; note = 2'-O-methyl modified nucleotide
  modified_base 4: mod_base = OTHER; note = 2'-fluoro modified nucleotide
  modified_base 5: mod_base = OTHER; note = 2'-O-methyl modified nucleotide
  modified_base 6: mod_base = OTHER; note = 2'-fluoro modified nucleotide
  modified_base 7: mod_base = OTHER; note = 2'-O-methyl modified nucleotide
  modified_base 8: mod_base = OTHER; note = 2'-fluoro modified nucleotide
  modified_base 9: mod_base = OTHER; note = 2'-O-methyl modified nucleotide
  modified_base 10: mod_base = OTHER; note = 2'-fluoro modified nucleotide
  modified_base 11: mod_base = OTHER; note = 2'-O-methyl modified nucleotide
  modified_base 12: mod_base = OTHER; note = 2'-fluoro modified nucleotide
  modified_base 13: mod_base = OTHER; note = 2'-O-methyl modified nucleotide
  modified_base 14: mod_base = OTHER; note = 2'-fluoro modified nucleotide with phosphorothioate linkage
  modified_base 15: mod_base = OTHER; note = 2'-O-methyl modified nucleotide with phosphorothioate linkage
  modified_base 16: mod_base = OTHER; note = 2'-fluoro modified nucleotide with phosphorothioate linkage
  modified_base 17: mod_base = OTHER; note = 2'-O-methyl modified nucleotide with phosphorothioate linkage
  modified_base 18: mod_base = OTHER; note = 2'-fluoro modified nucleotide with phosphorothioate linkage
  modified_base 19: mod_base = OTHER; note = 2'-O-methyl modified nucleotide with phosphorothioate linkage
  modified_base 20: mod_base = OTHER; note = 2'-O-methyl modified nucleotide
  modified_base 21: mod_base = OTHER; note = 2'-fluoro modified nucleotide
  modified_base 22: mod_base = OTHER; note = 2'-O-methyl modified nucleotide
  modified_base 23: mod_base = OTHER; note = 2'-fluoro modified nucleotide
  modified_base 24: mod_base = OTHER; note = 2'-O-methyl modified nucleotide
  modified_base 25: mod_base = OTHER; note = 2'-fluoro modified nucleotide
  modified_base 26: mod_base = OTHER; note = 2'-O-methyl modified nucleotide
  modified_base 27: mod_base = OTHER; note = 2'-fluoro modified nucleotide
  modified_base 28: mod_base = OTHER; note = 2'-O-methyl modified nucleotide
  modified_base 29: mod_base = OTHER; note = 2'-fluoro modified nucleotide
  modified_base 30: mod_base = OTHER; note = 2'-O-methyl modified nucleotide
  modified_base 31: mod_base = OTHER; note = 2'-fluoro modified nucleotide with phosphorothioate linkage
  modified_base 32: mod_base = OTHER; note = 2'-O-methyl modified nucleotide with phosphorothioate linkage
  modified_base 33: mod_base = OTHER; note = 2'-fluoro trivalent N-acetylgalactosamine modified nucleotide
nataaatgaacatggcctgcatgttcatttata

SEQ ID NO: 2059 - RNA, 34 nt, synthetic construct
  source 1..34: mol_type = other RNA
ntgaatgaaacgacttctcctgtttacaactatc

SEQ ID NO: 2060 - RNA, 34 nt, synthetic construct
  source 1..34: mol_type = other RNA
natagttgtaaacagttccagtcgtttcattcaa

SEQ ID NO: 2061 - RNA, 34 nt, synthetic construct
  source 1..34: mol_type = other RNA
ntgaatgaaacgacttctccatattctgttgtaa

SEQ ID NO: 2062 - RNA, 34 nt, synthetic construct
  source 1..34: mol_type = other RNA
ntacaacagaatatggtatagtcgtttcattcaa

SEQ ID NO: 2063 - RNA, 34 nt, synthetic construct
  source 1..34: mol_type = other RNA
ntgccacagactcagagagctgtttacaactatc

SEQ ID NO: 2064 - RNA, 34 nt, synthetic construct
  source 1..34: mol_type = other RNA
natagttgtaaacagttccctgagtctgtggcaa

SEQ ID NO: 2065 - RNA, 34 nt, synthetic construct
  source 1..34: mol_type = other RNA
ntgccacagactcagagagcatattctgttgtaa

SEQ ID NO: 2066 - RNA, 34 nt, synthetic construct
  source 1..34: mol_type = other RNA
ntacaacagaatatggtatctgagtctgtggcaa

SEQ ID NO: 2067 - RNA, 34 nt, synthetic construct; identical to SEQ ID NO: 2059
  source 1..34: mol_type = other RNA
  misc_difference 1: note = 2'-O-methyl modified nucleotide with phosphorothioate linkage may be 5' phosphate modified
  modified_base 2: mod_base = OTHER; note = 2'-fluoro modified nucleotide with phosphorothioate linkage
  modified_base 3: mod_base = OTHER; note = 2'-O-methyl modified nucleotide
  modified_base 4: mod_base = OTHER; note = 2'-fluoro modified nucleotide
  modified_base 5: mod_base = OTHER; note = 2'-O-methyl modified nucleotide
  modified_base 6: mod_base = OTHER; note = 2'-fluoro modified nucleotide
  modified_base 7: mod_base = OTHER; note = 2'-O-methyl modified nucleotide
  modified_base 8: mod_base = OTHER; note = 2'-fluoro modified nucleotide
  modified_base 9: mod_base = OTHER; note = 2'-O-methyl modified nucleotide
  modified_base 10: mod_base = OTHER; note = 2'-fluoro modified nucleotide
  modified_base 11: mod_base = OTHER; note = 2'-O-methyl modified nucleotide
  modified_base 12: mod_base = OTHER; note = 2'-fluoro modified nucleotide
  modified_base 13: mod_base = OTHER; note = 2'-O-methyl modified nucleotide
  modified_base 14: mod_base = OTHER; note = 2'-fluoro modified nucleotide
  modified_base 15: mod_base = OTHER; note = 2'-O-methyl modified nucleotide with phosphorothioate linkage
  modified_base 16: mod_base = OTHER; note = 2'-fluoro modified nucleotide with phosphorothioate linkage
  modified_base 17: mod_base = OTHER; note = 2'-O-methyl modified nucleotide with phosphorothioate linkage
  modified_base 18: mod_base = OTHER; note = 2'-fluoro modified nucleotide with phosphorothioate linkage
  modified_base 20: mod_base = OTHER; note = 2'-fluoro modified nucleotide with phosphorothioate linkage
  modified_base 21: mod_base = OTHER; note = 2'-O-methyl modified nucleotide with phosphorothioate linkage
  modified_base 22: mod_base = OTHER; note = 2'-fluoro modified nucleotide
  modified_base 23: mod_base = OTHER; note = 2'-O-methyl modified nucleotide
  modified_base 24: mod_base = OTHER; note = 2'-fluoro modified nucleotide
  modified_base 25: mod_base = OTHER; note = 2'-O-methyl modified nucleotide
  modified_base 26: mod_base = OTHER; note = 2'-fluoro modified nucleotide
  modified_base 27: mod_base = OTHER; note = 2'-O-methyl modified nucleotide
  modified_base 28: mod_base = OTHER; note = 2'-fluoro modified nucleotide
  modified_base 29: mod_base = OTHER; note = 2'-O-methyl modified nucleotide
  modified_base 30: mod_base = OTHER; note = 2'-fluoro modified nucleotide
  modified_base 31: mod_base = OTHER; note = 2'-O-methyl modified nucleotide
  modified_base 32: mod_base = OTHER; note = 2'-O-methyl modified nucleotide with phosphorothioate linkage
  modified_base 33: mod_base = OTHER; note = 2'-O-methyl modified nucleotide with phosphorothioate linkage
  modified_base 34: mod_base = OTHER; note = 2'-O-methyl trivalent N-acetylgalactosamine modified nucleotide

SEQ ID NO: 2068 - RNA, 34 nt, synthetic construct; identical to SEQ ID NO: 2060
  source 1..34: mol_type = other RNA
  misc_difference 1: note = 2'-O-methyl modified nucleotide with phosphorothioate linkage may be 5' phosphate modified
  modified_base 2: mod_base = OTHER; note = 2'-fluoro modified nucleotide with phosphorothioate linkage
  modified_base 3: mod_base = OTHER; note = 2'-O-methyl modified nucleotide
  modified_base 4: mod_base = OTHER; note = 2'-fluoro modified nucleotide
  modified_base 5: mod_base = OTHER; note = 2'-O-methyl modified nucleotide
  modified_base 6: mod_base = OTHER; note = 2'-fluoro modified nucleotide
  modified_base 7: mod_base = OTHER; note = 2'-O-methyl modified nucleotide
  modified_base 8: mod_base = OTHER; note = 2'-fluoro modified nucleotide
  modified_base 9: mod_base = OTHER; note = 2'-O-methyl modified nucleotide
  modified_base 10: mod_base = OTHER; note = 2'-fluoro modified nucleotide
  modified_base 11: mod_base = OTHER; note = 2'-O-methyl modified nucleotide
  modified_base 12: mod_base = OTHER; note = 2'-fluoro modified nucleotide
  modified_base 13: mod_base = OTHER; note = 2'-O-methyl modified nucleotide
  modified_base 14: mod_base = OTHER; note = 2'-fluoro modified nucleotide
  modified_base 15: mod_base = OTHER; note = 2'-O-methyl modified nucleotide with phosphorothioate linkage
  modified_base 16: mod_base = OTHER; note = 2'-fluoro modified nucleotide with phosphorothioate linkage
  modified_base 17: mod_base = OTHER; note = 2'-fluoro modified nucleotide with phosphorothioate linkage
  modified_base 18: mod_base = OTHER; note = 2'-fluoro modified nucleotide with phosphorothioate linkage
  modified_base 20: mod_base = OTHER; note = 2'-fluoro modified nucleotide with phosphorothioate linkage
  modified_base 21: mod_base = OTHER; note = 2'-O-methyl modified nucleotide with phosphorothioate linkage
  modified_base 22: mod_base = OTHER; note = 2'-fluoro modified nucleotide
  modified_base 23: mod_base = OTHER; note = 2'-O-methyl modified nucleotide
  modified_base 24: mod_base = OTHER; note = 2'-fluoro modified nucleotide
  modified_base 25: mod_base = OTHER; note = 2'-O-methyl modified nucleotide
  modified_base 26: mod_base = OTHER; note = 2'-fluoro modified nucleotide
  modified_base 27: mod_base = OTHER; note = 2'-O-methyl modified nucleotide
  modified_base 28: mod_base = OTHER; note = 2'-fluoro modified nucleotide
  modified_base 29: mod_base = OTHER; note = 2'-O-methyl modified nucleotide
  modified_base 30: mod_base = OTHER; note = 2'-fluoro modified nucleotide
  modified_base 31: mod_base = OTHER; note = 2'-O-methyl modified nucleotide
  modified_base 32: mod_base = OTHER; note = 2'-O-methyl modified nucleotide with phosphorothioate linkage
  modified_base 33: mod_base = OTHER; note = 2'-O-methyl modified nucleotide with phosphorothioate linkage
  modified_base 34: mod_base = OTHER; note = 2'-O-methyl trivalent N-acetylgalactosamine modified nucleotide

SEQ ID NO: 2069 - RNA, 34 nt, synthetic construct; identical to SEQ ID NO: 2061
  source 1..34: mol_type = other RNA
  misc_difference 1: note = 2'-O-methyl modified nucleotide with phosphorothioate linkage may be 5' phosphate modified
  modified_base 2: mod_base = OTHER; note = 2'-fluoro modified nucleotide with phosphorothioate linkage
  modified_base 3: mod_base = OTHER; note = 2'-O-methyl modified nucleotide
  modified_base 4: mod_base = OTHER; note = 2'-fluoro modified nucleotide
  modified_base 5: mod_base = OTHER; note = 2'-O-methyl modified nucleotide
  modified_base 6: mod_base = OTHER; note = 2'-fluoro modified nucleotide
  modified_base 7: mod_base = OTHER; note = 2'-O-methyl modified nucleotide
  modified_base 8: mod_base = OTHER; note = 2'-fluoro modified nucleotide
  modified_base 9: mod_base = OTHER; note = 2'-O-methyl modified nucleotide
  modified_base 10: mod_base = OTHER; note = 2'-fluoro modified nucleotide
  modified_base 11: mod_base = OTHER; note = 2'-O-methyl modified nucleotide
  modified_base 12: mod_base = OTHER; note = 2'-fluoro modified nucleotide
  modified_base 13: mod_base = OTHER; note = 2'-O-methyl modified nucleotide
  modified_base 14: mod_base = OTHER; note = 2'-fluoro modified nucleotide
  modified_base 15: mod_base = OTHER; note = 2'-O-methyl modified nucleotide with phosphorothioate linkage
  modified_base 16: mod_base = OTHER; note = 2'-fluoro modified nucleotide with phosphorothioate linkage
  modified_base 17: mod_base = OTHER; note = 2'-O-methyl modified nucleotide with phosphorothioate linkage
  modified_base 18: mod_base = OTHER; note = 2'-fluoro modified nucleotide with phosphorothioate linkage
  modified_base 20: mod_base = OTHER; note = 2'-fluoro modified nucleotide with phosphorothioate linkage
  modified_base 21: mod_base = OTHER; note = 2'-O-methyl modified nucleotide with phosphorothioate linkage
  modified_base 22: mod_base = OTHER; note = 2'-fluoro modified nucleotide
  modified_base 23: mod_base = OTHER; note = 2'-O-methyl modified nucleotide
  modified_base 24: mod_base = OTHER; note = 2'-fluoro modified nucleotide
  modified_base 25: mod_base = OTHER; note = 2'-O-methyl modified nucleotide
  modified_base 26: mod_base = OTHER; note = 2'-fluoro modified nucleotide
  modified_base 27: mod_base = OTHER; note = 2'-O-methyl modified nucleotide
  modified_base 28: mod_base = OTHER; note = 2'-fluoro modified nucleotide
  modified_base 29: mod_base = OTHER; note = 2'-O-methyl modified nucleotide
  modified_base 30: mod_base = OTHER; note = 2'-fluoro modified nucleotide
  modified_base 31: mod_base = OTHER; note = 2'-O-methyl modified nucleotide
  modified_base 32: mod_base = OTHER; note = 2'-O-methyl modified nucleotide with phosphorothioate linkage
  modified_base 33: mod_base = OTHER; note = 2'-O-methyl modified nucleotide with phosphorothioate linkage
  modified_base 34: mod_base = OTHER; note = 2'-O-methyl trivalent N-acetylgalactosamine modified nucleotide

SEQ ID NO: 2070 - RNA, 34 nt, synthetic construct; identical to SEQ ID NO: 2062
  source 1..34: mol_type = other RNA
  misc_difference 1: note = 2'-O-methyl modified nucleotide with phosphorothioate linkage may be 5' phosphate modified
  modified_base 2: mod_base = OTHER; note = 2'-fluoro modified nucleotide with phosphorothioate linkage
  modified_base 3: mod_base = OTHER; note = 2'-O-methyl modified nucleotide
  modified_base 4: mod_base = OTHER; note = 2'-fluoro modified nucleotide
  modified_base 5: mod_base = OTHER; note = 2'-O-methyl modified nucleotide
  modified_base 6: mod_base = OTHER; note = 2'-fluoro modified nucleotide
  modified_base 7: mod_base = OTHER; note = 2'-O-methyl modified nucleotide
  modified_base 8: mod_base = OTHER; note = 2'-fluoro modified nucleotide
  modified_base 9: mod_base = OTHER; note = 2'-O-methyl modified nucleotide
  modified_base 10: mod_base = OTHER; note = 2'-fluoro modified nucleotide
  modified_base 11: mod_base = OTHER; note = 2'-O-methyl modified nucleotide
  modified_base 12: mod_base = OTHER; note = 2'-fluoro modified nucleotide
  modified_base 13: mod_base = OTHER; note = 2'-O-methyl modified nucleotide
  modified_base 14: mod_base = OTHER; note = 2'-fluoro modified nucleotide
  modified_base 15: mod_base = OTHER; note = 2'-O-methyl modified nucleotide with phosphorothioate linkage
  modified_base 16: mod_base = OTHER; note = 2'-fluoro modified nucleotide with phosphorothioate linkage
  modified_base 17: mod_base = OTHER; note = 2'-O-methyl modified nucleotide with phosphorothioate linkage
  modified_base 18: mod_base = OTHER; note = 2'-fluoro modified nucleotide with phosphorothioate linkage
  modified_base 20: mod_base = OTHER; note = 2'-fluoro modified nucleotide with phosphorothioate linkage
  modified_base 21: mod_base = OTHER; note = 2'-O-methyl modified nucleotide with phosphorothioate linkage
  modified_base 22: mod_base = OTHER; note = 2'-fluoro modified nucleotide
  modified_base 23: mod_base = OTHER; note = 2'-O-methyl modified nucleotide
  modified_base 24: mod_base = OTHER; note = 2'-fluoro modified nucleotide
  modified_base 25: mod_base = OTHER; note = 2'-O-methyl modified nucleotide
  modified_base 26: mod_base = OTHER; note = 2'-fluoro modified nucleotide
  modified_base 27: mod_base = OTHER; note = 2'-O-methyl modified nucleotide
  modified_base 28: mod_base = OTHER; note = 2'-fluoro modified nucleotide
  modified_base 29: mod_base = OTHER; note = 2'-O-methyl modified nucleotide
  modified_base 30: mod_base = OTHER; note = 2'-fluoro modified nucleotide
  modified_base 31: mod_base = OTHER; note = 2'-O-methyl modified nucleotide
  modified_base 32: mod_base = OTHER; note = 2'-O-methyl modified nucleotide with phosphorothioate linkage
  modified_base 33: mod_base = OTHER; note = 2'-O-methyl modified nucleotide with phosphorothioate linkage
  modified_base 34: mod_base = OTHER; note = 2'-O-methyl trivalent N-acetylgalactosamine modified nucleotide

SEQ ID NO: 2071 - RNA, 34 nt, synthetic construct; identical to SEQ ID NO: 2063
  source 1..34: mol_type = other RNA
  misc_difference 1: note = 2'-O-methyl modified nucleotide with phosphorothioate linkage may be 5' phosphate modified
  modified_base 2: mod_base = OTHER; note = 2'-fluoro modified nucleotide with phosphorothioate linkage
  modified_base 3: mod_base = OTHER; note = 2'-O-methyl modified nucleotide
  modified_base 4: mod_base = OTHER; note = 2'-fluoro modified nucleotide
  modified_base 5: mod_base = OTHER; note = 2'-O-methyl modified nucleotide
  modified_base 6: mod_base = OTHER; note = 2'-fluoro modified nucleotide
  modified_base 7: mod_base = OTHER; note = 2'-O-methyl modified nucleotide
  modified_base 8: mod_base = OTHER; note = 2'-fluoro modified nucleotide
  modified_base 9: mod_base = OTHER; note = 2'-O-methyl modified nucleotide
  modified_base 10: mod_base = OTHER; note = 2'-fluoro modified nucleotide
  modified_base 11: mod_base = OTHER; note = 2'-O-methyl modified nucleotide
  modified_base 12: mod_base = OTHER; note = 2'-fluoro modified nucleotide
  modified_base 13: mod_base = OTHER; note = 2'-O-methyl modified nucleotide
  modified_base 14: mod_base = OTHER; note = 2'-fluoro modified nucleotide
  modified_base 15: mod_base = OTHER; note = 2'-O-methyl modified nucleotide
  modified_base 16: mod_base = OTHER; note = 2'-fluoro modified nucleotide with phosphorothioate linkage
  modified_base 17: mod_base = OTHER; note = 2'-O-methyl modified nucleotide with phosphorothioate linkage
  modified_base 18: mod_base = OTHER; note = 2'-O-methyl modified nucleotide with phosphorothioate linkage
  modified_base 20: mod_base = OTHER; note = 2'-fluoro modified nucleotide with phosphorothioate linkage
  modified_base 21: mod_base = OTHER; note = 2'-O-methyl modified nucleotide with phosphorothioate linkage
  modified_base 22: mod_base = OTHER; note = 2'-fluoro modified nucleotide
  modified_base 23: mod_base = OTHER; note = 2'-O-methyl modified nucleotide
  modified_base 24: mod_base = OTHER; note = 2'-fluoro modified nucleotide
  modified_base 25: mod_base = OTHER; note = 2'-O-methyl modified nucleotide
  modified_base 26: mod_base = OTHER; note = 2'-fluoro modified nucleotide
  modified_base 27: mod_base = OTHER; note = 2'-O-methyl modified nucleotide
  modified_base 28: mod_base = OTHER; note = 2'-fluoro modified nucleotide
  modified_base 29: mod_base = OTHER; note = 2'-O-methyl modified nucleotide
  modified_base 30: mod_base = OTHER; note = 2'-fluoro modified nucleotide
  modified_base 31: mod_base = OTHER; note = 2'-O-methyl modified nucleotide
  modified_base 32: mod_base = OTHER; note = 2'-O-methyl modified nucleotide with phosphorothioate linkage
  modified_base 33: mod_base = OTHER; note = 2'-O-methyl modified nucleotide with phosphorothioate linkage
  modified_base 34: mod_base = OTHER; note = 2'-O-methyl trivalent N-acetylgalactosamine modified nucleotide

SEQ ID NO: 2072 - RNA, 34 nt, synthetic construct; identical to SEQ ID NO: 2064
  source 1..34: mol_type = other RNA
  misc_difference 1: note = 2'-O-methyl modified nucleotide with phosphorothioate linkage may be 5' phosphate modified
  modified_base 2: mod_base = OTHER; note = 2'-fluoro modified nucleotide with phosphorothioate linkage
  modified_base 3: mod_base = OTHER; note = 2'-O-methyl modified nucleotide
  modified_base 4: mod_base = OTHER; note = 2'-fluoro modified nucleotide
  modified_base 5: mod_base = OTHER; note = 2'-O-methyl modified nucleotide
  modified_base 6: mod_base = OTHER; note = 2'-fluoro modified nucleotide
  modified_base 7: mod_base = OTHER; note = 2'-O-methyl modified nucleotide
  modified_base 8: mod_base = OTHER; note = 2'-fluoro modified nucleotide
  modified_base 9: mod_base = OTHER; note = 2'-O-methyl modified nucleotide
  modified_base 10: mod_base = OTHER; note = 2'-fluoro modified nucleotide
  modified_base 11: mod_base = OTHER; note = 2'-O-methyl modified nucleotide
  modified_base 12: mod_base = OTHER; note = 2'-fluoro modified nucleotide
  modified_base 13: mod_base = OTHER; note = 2'-O-methyl modified nucleotide
  modified_base 14: mod_base = OTHER; note = 2'-fluoro modified nucleotide
  modified_base 15: mod_base = OTHER; note = 2'-O-methyl modified nucleotide with phosphorothioate linkage
  modified_base 16: mod_base = OTHER; note = 2'-fluoro modified nucleotide with phosphorothioate linkage
  modified_base 17: mod_base = OTHER; note = 2'-fluoro modified nucleotide with phosphorothioate linkage
  modified_base 18: mod_base = OTHER; note = 2'-fluoro modified nucleotide with phosphorothioate linkage
  modified_base 20: mod_base = OTHER; note = 2'-fluoro modified nucleotide
  modified_base 21: mod_base = OTHER; note = 2'-O-methyl modified nucleotide
  modified_base 22: mod_base = OTHER; note = 2'-fluoro modified nucleotide
  modified_base 23: mod_base = OTHER; note = 2'-O-methyl modified nucleotide
  modified_base 24: mod_base = OTHER; note = 2'-fluoro modified nucleotide
  modified_base 25: mod_base = OTHER; note = 2'-O-methyl modified nucleotide
  modified_base 26: mod_base = OTHER; note = 2'-fluoro modified nucleotide
  modified_base 27: mod_base = OTHER; note = 2'-O-methyl modified nucleotide
  modified_base 28: mod_base = OTHER; note = 2'-fluoro modified nucleotide
  modified_base 29: mod_base = OTHER; note = 2'-O-methyl modified nucleotide
  modified_base 30: mod_base = OTHER; note = 2'-fluoro modified nucleotide
  modified_base 31: mod_base = OTHER; note = 2'-O-methyl modified nucleotide
  modified_base 32: mod_base = OTHER; note = 2'-O-methyl modified nucleotide with phosphorothioate linkage
  modified_base 33: mod_base = OTHER; note = 2'-O-methyl modified nucleotide with phosphorothioate linkage
  modified_base 34: mod_base = OTHER; note = 2'-O-methyl trivalent N-acetylgalactosamine modified nucleotide

SEQ ID NO: 2073 - RNA, 34 nt, synthetic construct; identical to SEQ ID NO: 2065
  source 1..34: mol_type = other RNA
  misc_difference 1: note = 2'-O-methyl modified nucleotide with phosphorothioate linkage may be 5' phosphate modified
  modified_base 2: mod_base = OTHER; note = 2'-fluoro modified nucleotide with phosphorothioate linkage
  modified_base 3: mod_base = OTHER; note = 2'-O-methyl modified nucleotide
  modified_base 4: mod_base = OTHER; note = 2'-fluoro modified nucleotide
  modified_base 5: mod_base = OTHER; note = 2'-O-methyl modified nucleotide
  modified_base 6: mod_base = OTHER; note = 2'-fluoro modified nucleotide
  modified_base 7: mod_base = OTHER; note = 2'-O-methyl modified nucleotide
  modified_base 8: mod_base = OTHER; note = 2'-fluoro modified nucleotide
  modified_base 9: mod_base = OTHER; note = 2'-O-methyl modified nucleotide
  modified_base 10: mod_base = OTHER; note = 2'-fluoro modified nucleotide
  modified_base 11: mod_base = OTHER; note = 2'-O-methyl modified nucleotide
  modified_base 12: mod_base = OTHER; note = 2'-fluoro modified nucleotide
  modified_base 13: mod_base = OTHER; note = 2'-O-methyl modified nucleotide
  modified_base 14: mod_base = OTHER; note = 2'-fluoro modified nucleotide
  modified_base 15: mod_base = OTHER; note = 2'-O-methyl modified nucleotide
  modified_base 16: mod_base = OTHER; note = 2'-fluoro modified nucleotide with phosphorothioate linkage
  modified_base 17: mod_base = OTHER; note = 2'-O-methyl modified nucleotide with phosphorothioate linkage
  modified_base 18: mod_base = OTHER; note = 2'-O-methyl modified nucleotide with phosphorothioate linkage
  modified_base 20: mod_base = OTHER; note = 2'-fluoro modified nucleotide with phosphorothioate linkage
  modified_base 21: mod_base = OTHER; note = 2'-O-methyl modified nucleotide with phosphorothioate linkage
  modified_base 22: mod_base = OTHER; note = 2'-fluoro modified nucleotide
  modified_base 23: mod_base = OTHER; note = 2'-O-methyl modified nucleotide
  modified_base 24: mod_base = OTHER; note = 2'-fluoro modified nucleotide
  modified_base 25: mod_base = OTHER; note = 2'-O-methyl modified nucleotide
  modified_base 26: mod_base = OTHER; note = 2'-fluoro modified nucleotide
  modified_base 27: mod_base = OTHER; note = 2'-O-methyl modified nucleotide
  modified_base 28: mod_base = OTHER; note = 2'-fluoro modified nucleotide
  modified_base 29: mod_base = OTHER; note = 2'-O-methyl modified nucleotide
  modified_base 30: mod_base = OTHER; note = 2'-fluoro modified nucleotide
  modified_base 31: mod_base = OTHER; note = 2'-O-methyl modified nucleotide
  modified_base 32: mod_base = OTHER; note = 2'-O-methyl modified nucleotide with phosphorothioate linkage
  modified_base 33: mod_base = OTHER; note = 2'-O-methyl modified nucleotide with phosphorothioate linkage
  modified_base 34: mod_base = OTHER; note = 2'-O-methyl trivalent N-acetylgalactosamine modified nucleotide

SEQ ID NO: 2074 - RNA, 34 nt, synthetic construct; identical to SEQ ID NO: 2066
  source 1..34: mol_type = other RNA
  misc_difference 1: note = 2'-O-methyl modified nucleotide with phosphorothioate linkage may be 5' phosphate modified
  modified_base 2: mod_base = OTHER; note = 2'-fluoro modified nucleotide with phosphorothioate linkage
  modified_base 3: mod_base = OTHER; note = 2'-O-methyl modified nucleotide
  modified_base 4: mod_base = OTHER; note = 2'-fluoro modified nucleotide
  modified_base 5: mod_base = OTHER; note = 2'-O-methyl modified nucleotide
  modified_base 6: mod_base = OTHER; note = 2'-fluoro modified nucleotide
  modified_base 7: mod_base = OTHER; note = 2'-O-methyl modified nucleotide
  modified_base 8: mod_base = OTHER; note = 2'-fluoro modified nucleotide
  modified_base 9: mod_base = OTHER; note = 2'-O-methyl modified nucleotide
  modified_base 10: mod_base = OTHER; note = 2'-fluoro modified nucleotide
  modified_base 11: mod_base = OTHER; note = 2'-O-methyl modified nucleotide
  modified_base 12: mod_base = OTHER; note = 2'-fluoro modified nucleotide
  modified_base 13: mod_base = OTHER; note = 2'-O-methyl modified nucleotide
  modified_base 14: mod_base = OTHER; note = 2'-fluoro modified nucleotide
  modified_base 15: mod_base = OTHER; note = 2'-O-methyl modified nucleotide with phosphorothioate linkage
  modified_base 16: mod_base = OTHER; note = 2'-fluoro modified nucleotide with phosphorothioate linkage
  modified_base 17: mod_base = OTHER; note = 2'-O-methyl modified nucleotide with phosphorothioate linkage
  modified_base 18: mod_base = OTHER; note = 2'-fluoro modified nucleotide with phosphorothioate linkage
  modified_base 20: mod_base = OTHER; note = 2'-fluoro modified nucleotide
  modified_base 21: mod_base = OTHER; note = 2'-O-methyl modified nucleotide
  modified_base 22: mod_base = OTHER; note = 2'-fluoro modified nucleotide
  modified_base 23: mod_base = OTHER; note = 2'-O-methyl modified nucleotide
  modified_base 24: mod_base = OTHER; note = 2'-fluoro modified nucleotide
  modified_base 25: mod_base = OTHER; note = 2'-O-methyl modified nucleotide
  modified_base 26: mod_base = OTHER; note = 2'-fluoro modified nucleotide
  modified_base 27: mod_base = OTHER; note = 2'-O-methyl modified nucleotide
  modified_base 28: mod_base = OTHER; note = 2'-fluoro modified nucleotide
  modified_base 29: mod_base = OTHER; note = 2'-O-methyl modified nucleotide
  modified_base 30: mod_base = OTHER; note = 2'-fluoro modified nucleotide
  modified_base 31: mod_base = OTHER; note = 2'-O-methyl modified nucleotide
  modified_base 32: mod_base = OTHER; note = 2'-O-methyl modified nucleotide with phosphorothioate linkage
  modified_base 33: mod_base = OTHER; note = 2'-O-methyl modified nucleotide with phosphorothioate linkage
  modified_base 34: mod_base = OTHER; note = 2'-O-methyl trivalent N-acetylgalactosamine modified nucleotide

SEQ ID NO: 2075 - RNA, 19 nt, synthetic construct
  source 1..19: mol_type = other RNA
  modified_base 1: mod_base = OTHER; note = 5' phosphate 2'-O-methyl modified nucleotide with phosphorothioate linkage
  modified_base 2: mod_base = OTHER; note = 2'-fluoro modified nucleotide with phosphorothioate linkage
  modified_base 3: mod_base = OTHER; note = 2'-O-methyl modified nucleotide
  modified_base 4: mod_base = OTHER; note = 2'-fluoro modified nucleotide
  modified_base 5: mod_base = OTHER; note = 2'-O-methyl modified nucleotide
  modified_base 6: mod_base = OTHER; note = 2'-fluoro modified nucleotide
  modified_base 7: mod_base = OTHER; note = 2'-O-methyl modified nucleotide
  modified_base 8: mod_base = OTHER; note = 2'-fluoro modified nucleotide
  modified_base 9: mod_base = OTHER; note = 2'-O-methyl modified nucleotide
  modified_base 10: mod_base = OTHER; note = 2'-fluoro modified nucleotide
  modified_base 11: mod_base = OTHER; note = 2'-O-methyl modified nucleotide
  modified_base 12: mod_base = OTHER; note = 2'-fluoro modified nucleotide
  modified_base 13: mod_base = OTHER; note = 2'-O-methyl modified nucleotide
  modified_base 14: mod_base = OTHER; note = 2'-fluoro modified nucleotide
  modified_base 15: mod_base = OTHER; note = 2'-O-methyl modified nucleotide with phosphorothioate linkage
  modified_base 16: mod_base = OTHER; note = 2'-fluoro modified nucleotide with phosphorothioate linkage
  modified_base 17: mod_base = OTHER; note = 2'-O-methyl modified nucleotide with phosphorothioate linkage
  modified_base 18: mod_base = OTHER; note = 2'-fluoro modified nucleotide with phosphorothioate linkage
ttgaatgaaacgacttctc

SEQ ID NO: 2076 - RNA, 19 nt, synthetic construct
  source 1..19: mol_type = other RNA
  modified_base 1: mod_base = OTHER; note = 5' phosphate 2'-O-methyl modified nucleotide with phosphorothioate linkage
  modified_base 2: mod_base = OTHER; note = 2'-fluoro modified nucleotide with phosphorothioate linkage
  modified_base 3: mod_base = OTHER; note = 2'-O-methyl modified nucleotide
  modified_base 4: mod_base = OTHER; note = 2'-fluoro modified nucleotide
  modified_base 5: mod_base = OTHER; note = 2'-O-methyl modified nucleotide
  modified_base 6: mod_base = OTHER; note = 2'-fluoro modified nucleotide
  modified_base 7: mod_base = OTHER; note = 2'-O-methyl modified nucleotide
  modified_base 8: mod_base = OTHER; note = 2'-fluoro modified nucleotide
  modified_base 9: mod_base = OTHER; note = 2'-O-methyl modified nucleotide
  modified_base 10: mod_base = OTHER; note = 2'-fluoro modified nucleotide
  modified_base 11: mod_base = OTHER; note = 2'-O-methyl modified nucleotide
  modified_base 12: mod_base = OTHER; note = 2'-fluoro modified nucleotide
  modified_base 13: mod_base = OTHER; note = 2'-O-methyl modified nucleotide
  modified_base 14: mod_base = OTHER; note = 2'-fluoro modified nucleotide
  modified_base 15: mod_base = OTHER; note = 2'-O-methyl modified nucleotide
  modified_base 16: mod_base = OTHER; note = 2'-fluoro modified nucleotide with phosphorothioate linkage
  modified_base 17: mod_base = OTHER; note = 2'-O-methyl modified nucleotide with phosphorothioate linkage
  modified_base 18: mod_base = OTHER; note = 2'-O-methyl modified nucleotide with phosphorothioate linkage
ttgccacagactcagagag

SEQ ID NO: 2077 - RNA, 19 nt, synthetic construct
  source 1..19: mol_type = other RNA
  modified_base 1: mod_base = OTHER; note = 5' phosphate 2'-O-methyl modified nucleotide with phosphorothioate linkage
  modified_base 2: mod_base = OTHER; note = 2'-fluoro modified nucleotide with phosphorothioate linkage
  modified_base 3: mod_base = OTHER; note = 2'-O-methyl modified nucleotide
  modified_base 4: mod_base = OTHER; note = 2'-fluoro modified nucleotide
  modified_base 5: mod_base = OTHER; note = 2'-O-methyl modified nucleotide
  modified_base 6: mod_base = OTHER; note = 2'-fluoro modified nucleotide
  modified_base 7: mod_base = OTHER; note = 2'-O-methyl modified nucleotide
  modified_base 8: mod_base = OTHER; note = 2'-fluoro modified nucleotide
  modified_base 9: mod_base = OTHER; note = 2'-O-methyl modified nucleotide
  modified_base 10: mod_base = OTHER; note = 2'-fluoro modified nucleotide
  modified_base 11: mod_base = OTHER; note = 2'-O-methyl modified nucleotide
  modified_base 12: mod_base = OTHER; note = 2'-fluoro modified nucleotide
  modified_base 13: mod_base = OTHER; note = 2'-O-methyl modified nucleotide
  modified_base 14: mod_base = OTHER; note = 2'-fluoro modified nucleotide
  modified_base 15: mod_base = OTHER; note = 2'-O-methyl modified nucleotide with phosphorothioate linkage
  modified_base 16: mod_base = OTHER; note = 2'-fluoro modified nucleotide with phosphorothioate linkage
  modified_base 17: mod_base = OTHER; note = 2'-fluoro modified nucleotide with phosphorothioate linkage
  modified_base 18: mod_base = OTHER; note = 2'-fluoro modified nucleotide with phosphorothioate linkage
gatagttgtaaacagttcc

SEQ ID NO: 2078 - RNA, 19 nt, synthetic construct
  source 1..19: mol_type = other RNA
  modified_base 1: mod_base = OTHER; note = 5' phosphate 2'-O-methyl modified nucleotide with phosphorothioate linkage
  modified_base 2: mod_base = OTHER; note = 2'-fluoro modified nucleotide with phosphorothioate linkage
  modified_base 3: mod_base = OTHER; note = 2'-O-methyl modified nucleotide
  modified_base 4: mod_base = OTHER; note = 2'-fluoro modified nucleotide
  modified_base 5: mod_base = OTHER; note = 2'-O-methyl modified nucleotide
  modified_base 6: mod_base = OTHER; note = 2'-fluoro modified nucleotide
  modified_base 7: mod_base = OTHER; note = 2'-O-methyl modified nucleotide
  modified_base 8: mod_base = OTHER; note = 2'-fluoro modified nucleotide
  modified_base 9: mod_base = OTHER; note = 2'-O-methyl modified nucleotide
  modified_base 10: mod_base = OTHER; note = 2'-fluoro modified nucleotide
  modified_base 11: mod_base = OTHER; note = 2'-O-methyl modified nucleotide
  modified_base 12: mod_base = OTHER; note = 2'-fluoro modified nucleotide
  modified_base 13: mod_base = OTHER; note = 2'-O-methyl modified nucleotide
  modified_base 14: mod_base = OTHER; note = 2'-fluoro modified nucleotide
  modified_base 15: mod_base = OTHER; note = 2'-O-methyl modified nucleotide with phosphorothioate linkage
  modified_base 16: mod_base = OTHER; note = 2'-fluoro modified nucleotide with phosphorothioate linkage
  modified_base 17: mod_base = OTHER; note = 2'-O-methyl modified nucleotide with phosphorothioate linkage
  modified_base 18: mod_base = OTHER; note = 2'-fluoro modified nucleotide with phosphorothioate linkage
ttacaacagaatatggtat

SEQ ID NO: 2079 - RNA, 15 nt, synthetic construct
  source 1..15: mol_type = other RNA
  modified_base 1: mod_base = OTHER; note = 2'-fluoro modified nucleotide with phosphorothioate linkage
  modified_base 2: mod_base = OTHER; note = 2'-O-methyl modified nucleotide with phosphorothioate linkage
  modified_base 3: mod_base = OTHER; note = 2'-fluoro modified nucleotide
  modified_base 4: mod_base = OTHER; note = 2'-O-methyl modified nucleotide
  modified_base 5: mod_base = OTHER; note = 2'-fluoro modified nucleotide
  modified_base 6: mod_base = OTHER; note = 2'-O-methyl modified nucleotide
  modified_base 7: mod_base = OTHER; note = 2'-fluoro modified nucleotide
  modified_base 8: mod_base = OTHER; note = 2'-O-methyl modified nucleotide
  modified_base 9: mod_base = OTHER; note = 2'-fluoro modified nucleotide
  modified_base 10: mod_base = OTHER; note = 2'-O-methyl modified nucleotide
  modified_base 11: mod_base = OTHER; note = 2'-fluoro modified nucleotide
  modified_base 12: mod_base = OTHER; note = 2'-O-methyl modified nucleotide
  modified_base 13: mod_base = OTHER; note = 2'-O-methyl modified nucleotide with phosphorothioate linkage
  modified_base 14: mod_base = OTHER; note = 2'-O-methyl modified nucleotide with phosphorothioate linkage
  modified_base 15: mod_base = OTHER; note = 2'-O-methyl modified nucleotide with phosphorothioate linkage attached to trivalent N-acetylgalactosamine
ctgtttacaactatc

SEQ ID NO: 2080 - RNA, 15 nt, synthetic construct
  source 1..15: mol_type = other RNA
  modified_base 1: mod_base = OTHER; note = 2'-fluoro modified nucleotide
  modified_base 2: mod_base = OTHER; note = 2'-O-methyl modified nucleotide
  modified_base 3: mod_base = OTHER; note = 2'-fluoro modified nucleotide
  modified_base 4: mod_base = OTHER; note = 2'-O-methyl modified nucleotide
  modified_base 5: mod_base = OTHER; note = 2'-fluoro modified nucleotide
  modified_base 6: mod_base = OTHER; note = 2'-O-methyl modified nucleotide
  modified_base 7: mod_base = OTHER; note = 2'-fluoro modified nucleotide
  modified_base 8: mod_base = OTHER; note = 2'-O-methyl modified nucleotide
  modified_base 9: mod_base = OTHER; note = 2'-fluoro modified nucleotide
  modified_base 10: mod_base = OTHER; note = 2'-O-methyl modified nucleotide
  modified_base 11: mod_base = OTHER; note = 2'-fluoro modified nucleotide
  modified_base 12: mod_base = OTHER; note = 2'-O-methyl modified nucleotide
  modified_base 13: mod_base = OTHER; note = 2'-O-methyl modified nucleotide with phosphorothioate linkage
  modified_base 14: mod_base = OTHER; note = 2'-O-methyl modified nucleotide with phosphorothioate linkage
  modified_base 15: mod_base = OTHER; note = 2'-O-methyl modified nucleotide with phosphorothioate linkage attached to trivalent N-acetylgalactosamine
ctgagtctgtggcaa

SEQ ID NO: 2081 - RNA, 15 nt, synthetic construct
  source 1..15: mol_type = other RNA
  modified_base 1: mod_base = OTHER; note = 2'-fluoro modified nucleotide
  modified_base 2: mod_base = OTHER; note = 2'-O-methyl modified nucleotide
  modified_base 3: mod_base = OTHER; note = 2'-fluoro modified nucleotide
  modified_base 4: mod_base = OTHER; note = 2'-O-methyl modified nucleotide
  modified_base 5: mod_base = OTHER; note = 2'-fluoro modified nucleotide
  modified_base 6: mod_base = OTHER; note = 2'-O-methyl modified nucleotide
  modified_base 7: mod_base = OTHER; note = 2'-fluoro modified nucleotide
  modified_base 8: mod_base = OTHER; note = 2'-O-methyl modified nucleotide
  modified_base 9: mod_base = OTHER; note = 2'-fluoro modified nucleotide
  modified_base 10: mod_base = OTHER; note = 2'-O-methyl modified nucleotide
  modified_base 11: mod_base = OTHER; note = 2'-fluoro modified nucleotide
  modified_base 12: mod_base = OTHER; note = 2'-O-methyl modified nucleotide
  modified_base 13: mod_base = OTHER; note = 2'-O-methyl modified nucleotide with phosphorothioate linkage
  modified_base 14: mod_base = OTHER; note = 2'-O-methyl modified nucleotide with phosphorothioate linkage
  modified_base 15: mod_base = OTHER; note = 2'-O-methyl modified nucleotide with phosphorothioate linkage
ctgagtctgtggcaa

SEQ ID NO: 2082 - RNA, 34 nt, synthetic construct
  source 1..34: mol_type = other RNA
  modified_base 1: mod_base = OTHER; note = 5' phosphate 2'-O-methyl modified nucleotide with phosphorothioate linkage
  modified_base 2: mod_base = OTHER; note = 2'-fluoro modified nucleotide with phosphorothioate linkage
  modified_base 3: mod_base = OTHER; note = 2'-O-methyl modified nucleotide
  modified_base 4: mod_base = OTHER; note = 2'-fluoro modified nucleotide
  modified_base 5: mod_base = OTHER; note = 2'-O-methyl modified nucleotide
  modified_base 6: mod_base = OTHER; note = 2'-fluoro modified nucleotide
  modified_base 7: mod_base = OTHER; note = 2'-O-methyl modified nucleotide
  modified_base 8: mod_base = OTHER; note = 2'-fluoro modified nucleotide
  modified_base 9: mod_base = OTHER; note = 2'-O-methyl modified nucleotide
  modified_base 10: mod_base = OTHER; note = 2'-fluoro modified nucleotide
  modified_base 11: mod_base = OTHER; note = 2'-O-methyl modified nucleotide
  modified_base 12: mod_base = OTHER; note = 2'-fluoro modified nucleotide
  modified_base 13: mod_base = OTHER; note = 2'-O-methyl modified nucleotide
  modified_base 14: mod_base = OTHER; note = 2'-fluoro modified nucleotide
  modified_base 15: mod_base = OTHER; note = 2'-O-methyl modified nucleotide with phosphorothioate linkage
  modified_base 16: mod_base = OTHER; note = 2'-fluoro modified nucleotide with phosphorothioate linkage
  modified_base 17: mod_base = OTHER; note = 2'-O-methyl modified nucleotide with phosphorothioate linkage
  modified_base 18: mod_base = OTHER; note = 2'-fluoro modified nucleotide with phosphorothioate linkage
  modified_base 20: mod_base = OTHER; note = 2'-fluoro modified nucleotide with phosphorothioate linkage
  modified_base 21: mod_base = OTHER; note = 2'-O-methyl modified nucleotide with phosphorothioate linkage
  modified_base 22: mod_base = OTHER; note = 2'-fluoro modified nucleotide
  modified_base 23: mod_base = OTHER; note = 2'-O-methyl modified nucleotide
  modified_base 24: mod_base = OTHER; note = 2'-fluoro modified nucleotide
  modified_base 25: mod_base = OTHER; note = 2'-O-methyl modified nucleotide
  modified_base 26: mod_base = OTHER; note = 2'-fluoro modified nucleotide
  modified_base 27: mod_base = OTHER; note = 2'-O-methyl modified nucleotide
  modified_base 28: mod_base = OTHER; note = 2'-fluoro modified nucleotide
  modified_base 29: mod_base = OTHER; note = 2'-O-methyl modified nucleotide
  modified_base 30: mod_base = OTHER; note = 2'-fluoro modified nucleotide
  modified_base 31: mod_base = OTHER; note = 2'-O-methyl modified nucleotide
  modified_base 32: mod_base = OTHER; note = 2'-O-methyl modified nucleotide with phosphorothioate linkage
  modified_base 33: mod_base = OTHER; note = 2'-O-methyl modified nucleotide with phosphorothioate linkage
  modified_base 34: mod_base = OTHER; note = 2'-O-methyl modified nucleotide with phosphorothioate linkage attached to trivalent N-acetylgalactosamine
ttgaatgaaacgacttctcctgtttacaactatc

SEQ ID NO: 2083 - RNA, 34 nt, synthetic construct
  source 1..34: mol_type = other RNA
  modified_base 1: mod_base = OTHER; note = 5' phosphate 2'-O-methyl modified nucleotide with phosphorothioate linkage
  modified_base 2: mod_base = OTHER; note = 2'-fluoro modified nucleotide with phosphorothioate linkage
  modified_base 3: mod_base = OTHER; note = 2'-O-methyl modified nucleotide
  modified_base 4: mod_base = OTHER; note = 2'-fluoro modified nucleotide
  modified_base 5: mod_base = OTHER; note = 2'-O-methyl modified nucleotide
  modified_base 6: mod_base = OTHER; note = 2'-fluoro modified nucleotide
  modified_base 7: mod_base = OTHER; note = 2'-O-methyl modified nucleotide
  modified_base 8: mod_base = OTHER; note = 2'-fluoro modified nucleotide
  modified_base 9: mod_base = OTHER; note = 2'-O-methyl modified nucleotide
  modified_base 10: mod_base = OTHER; note = 2'-fluoro modified nucleotide
  modified_base 11: mod_base = OTHER; note = 2'-O-methyl modified nucleotide
  modified_base 12: mod_base = OTHER; note = 2'-fluoro modified nucleotide
  modified_base 13: mod_base = OTHER; note = 2'-O-methyl modified nucleotide
  modified_base 14: mod_base = OTHER; note = 2'-fluoro modified nucleotide
  modified_base 15: mod_base = OTHER; note = 2'-O-methyl modified nucleotide with phosphorothioate linkage
  modified_base 16: mod_base = OTHER; note = 2'-fluoro modified nucleotide with phosphorothioate linkage
  modified_base 17: mod_base = OTHER; note = 2'-O-methyl modified nucleotide with phosphorothioate linkage
  modified_base 18: mod_base = OTHER; note = 2'-fluoro modified nucleotide with phosphorothioate linkage
  modified_base 20: mod_base = OTHER; note = 2'-fluoro modified nucleotide with phosphorothioate linkage
  modified_base 21: mod_base = OTHER; note = 2'-O-methyl modified nucleotide with phosphorothioate linkage
  modified_base 22: mod_base = OTHER; note = 2'-fluoro modified nucleotide
  modified_base 23: mod_base = OTHER; note = 2'-O-methyl modified nucleotide
  modified_base 24: mod_base = OTHER; note = 2'-fluoro modified nucleotide
  modified_base 25: mod_base = OTHER; note = 2'-O-methyl modified nucleotide
  modified_base 26: mod_base = OTHER; note = 2'-fluoro modified nucleotide
  modified_base 27: mod_base = OTHER; note = 2'-O-methyl modified nucleotide
  modified_base 28: mod_base = OTHER; note = 2'-fluoro modified nucleotide
  modified_base 29: mod_base = OTHER; note = 2'-O-methyl modified nucleotide
  modified_base 30: mod_base = OTHER; note = 2'-fluoro modified nucleotide
  modified_base 31: mod_base = OTHER; note = 2'-O-methyl modified nucleotide
  modified_base 32: mod_base = OTHER; note = 2'-O-methyl modified nucleotide with phosphorothioate linkage
  modified_base 33: mod_base = OTHER; note = 2'-O-methyl modified nucleotide with phosphorothioate linkage
  modified_base 34: mod_base = OTHER; note = 2'-O-methyl modified nucleotide with phosphorothioate linkage attached to trivalent N-acetylgalactosamine
ttgaatgaaacgacttctccatattctgttgtaa

SEQ ID NO: 2084 - RNA, 34 nt, synthetic construct
  source 1..34: mol_type = other RNA
  modified_base 1: mod_base = OTHER; note = 5' phosphate 2'-O-methyl modified nucleotide with phosphorothioate linkage
  modified_base 2: mod_base = OTHER; note = 2'-fluoro modified nucleotide with phosphorothioate linkage
  modified_base 3: mod_base = OTHER; note = 2'-O-methyl modified nucleotide
  modified_base 4: mod_base = OTHER; note = 2'-fluoro modified nucleotide
  modified_base 5: mod_base = OTHER; note = 2'-O-methyl modified nucleotide
  modified_base 6: mod_base = OTHER; note = 2'-fluoro modified nucleotide
  modified_base 7: mod_base = OTHER; note = 2'-O-methyl modified nucleotide
  modified_base 8: mod_base = OTHER; note = 2'-fluoro modified nucleotide
  modified_base 9: mod_base = OTHER; note = 2'-O-methyl modified nucleotide
  modified_base 10: mod_base = OTHER; note = 2'-fluoro modified nucleotide
  modified_base 11: mod_base = OTHER; note = 2'-O-methyl modified nucleotide
  modified_base 12: mod_base = OTHER; note = 2'-fluoro modified nucleotide
  modified_base 13: mod_base = OTHER; note = 2'-O-methyl modified nucleotide
  modified_base 14: mod_base = OTHER; note = 2'-fluoro modified nucleotide
  modified_base 15: mod_base = OTHER; note = 2'-O-methyl modified nucleotide
  modified_base 16: mod_base = OTHER; note = 2'-fluoro modified nucleotide with phosphorothioate linkage
  modified_base 17: mod_base = OTHER; note = 2'-O-methyl modified nucleotide with phosphorothioate linkage
  modified_base 18: mod_base = OTHER; note = 2'-O-methyl modified nucleotide with phosphorothioate linkage
  modified_base 20: mod_base = OTHER; note = 2'-fluoro modified nucleotide with phosphorothioate linkage
  modified_base 21: mod_base = OTHER; note = 2'-O-methyl modified nucleotide with phosphorothioate linkage
  modified_base 22: mod_base = OTHER; note = 2'-fluoro modified nucleotide
  modified_base 23: mod_base = OTHER; note = 2'-O-methyl modified nucleotide
  modified_base 24: mod_base = OTHER; note = 2'-fluoro modified nucleotide
  modified_base 25: mod_base = OTHER; note = 2'-O-methyl modified nucleotide
  modified_base 26: mod_base = OTHER; note = 2'-fluoro modified nucleotide
  modified_base 27: mod_base = OTHER; note = 2'-O-methyl modified nucleotide
  modified_base 28: mod_base = OTHER; note = 2'-fluoro modified nucleotide
  modified_base 29: mod_base = OTHER; note = 2'-O-methyl modified nucleotide
  modified_base 30: mod_base = OTHER; note = 2'-fluoro modified nucleotide
  modified_base 31: mod_base = OTHER; note = 2'-O-methyl modified nucleotide
  modified_base 32: mod_base = OTHER; note = 2'-O-methyl modified nucleotide with phosphorothioate linkage
  modified_base 33: mod_base = OTHER; note = 2'-O-methyl modified nucleotide with phosphorothioate linkage
  modified_base 34: mod_base = OTHER; note = 2'-O-methyl modified nucleotide with phosphorothioate linkage attached to trivalent N-acetylgalactosamine
ttgccacagactcagagagctgtttacaactatc

SEQ ID NO: 2085 - RNA, 34 nt, synthetic construct
  source 1..34: mol_type = other RNA
  modified_base 1: mod_base = OTHER; note = 5' phosphate 2'-O-methyl modified nucleotide with phosphorothioate linkage
  modified_base 2: mod_base = OTHER; note = 2'-fluoro modified nucleotide with phosphorothioate linkage
  modified_base 3: mod_base = OTHER; note = 2'-O-methyl modified nucleotide
  modified_base 4: mod_base = OTHER; note = 2'-fluoro modified nucleotide
  modified_base 5: mod_base = OTHER; note = 2'-O-methyl modified nucleotide
  modified_base 6: mod_base = OTHER; note = 2'-fluoro modified nucleotide
  modified_base 7: mod_base = OTHER; note = 2'-O-methyl modified nucleotide
  modified_base 8: mod_base = OTHER; note = 2'-fluoro modified nucleotide
  modified_base 9: mod_base = OTHER; note = 2'-O-methyl modified nucleotide
  modified_base 10: mod_base = OTHER; note = 2'-fluoro modified nucleotide
  modified_base 11: mod_base = OTHER; note = 2'-O-methyl modified nucleotide
  modified_base 12: mod_base = OTHER; note = 2'-fluoro modified nucleotide
  modified_base 13: mod_base = OTHER; note = 2'-O-methyl modified nucleotide
  modified_base 14: mod_base = OTHER; note = 2'-fluoro modified nucleotide
  modified_base 15: mod_base = OTHER; note = 2'-O-methyl modified nucleotide
  modified_base 16: mod_base = OTHER; note = 2'-fluoro modified nucleotide with phosphorothioate linkage
  modified_base 17: mod_base = OTHER; note = 2'-O-methyl modified nucleotide with phosphorothioate linkage
  modified_base 18: mod_base = OTHER; note = 2'-O-methyl modified nucleotide with phosphorothioate linkage
  modified_base 20: mod_base = OTHER; note = 2'-fluoro modified nucleotide with phosphorothioate linkage
  modified_base 21: mod_base = OTHER; note = 2'-O-methyl modified nucleotide with phosphorothioate linkage
  modified_base 22: mod_base = OTHER; note = 2'-fluoro modified nucleotide
  modified_base 23: mod_base = OTHER; note = 2'-O-methyl modified nucleotide
  modified_base 24: mod_base = OTHER; note = 2'-fluoro modified nucleotide
  modified_base 25: mod_base = OTHER; note = 2'-O-methyl modified nucleotide
  modified_base 26: mod_base = OTHER; note = 2'-fluoro modified nucleotide
  modified_base 27: mod_base = OTHER; note = 2'-O-methyl modified nucleotide
  modified_base 28: mod_base = OTHER; note = 2'-fluoro modified nucleotide
  modified_base 29: mod_base = OTHER; note = 2'-O-methyl modified nucleotide
  modified_base 30: mod_base = OTHER; note = 2'-fluoro modified nucleotide
  modified_base 31: mod_base = OTHER; note = 2'-O-methyl modified nucleotide
  modified_base 32: mod_base = OTHER; note = 2'-O-methyl modified nucleotide with phosphorothioate linkage
  modified_base 33: mod_base = OTHER; note = 2'-O-methyl modified nucleotide with phosphorothioate linkage
  modified_base 34: mod_base = OTHER; note = 2'-O-methyl modified nucleotide with phosphorothioate linkage attached to trivalent N-acetylgalactosamine
ttgccacagactcagagagcatattctgttgtaa

SEQ ID NO: 2086 - RNA, 34 nt, synthetic construct
  source 1..34: mol_type = other RNA
  modified_base 1: mod_base = OTHER; note = 5' phosphate 2'-O-methyl modified nucleotide with phosphorothioate linkage
  modified_base 2: mod_base = OTHER; note = 2'-fluoro modified nucleotide with phosphorothioate linkage
  modified_base 3: mod_base = OTHER; note = 2'-O-methyl modified nucleotide
  modified_base 4: mod_base = OTHER; note = 2'-fluoro modified nucleotide
  modified_base 5: mod_base = OTHER; note = 2'-O-methyl modified nucleotide
  modified_base 6: mod_base = OTHER; note = 2'-fluoro modified nucleotide
  modified_base 7: mod_base = OTHER; note = 2'-O-methyl modified nucleotide
  modified_base 8: mod_base = OTHER; note = 2'-fluoro modified nucleotide
  modified_base 9: mod_base = OTHER; note = 2'-O-methyl modified nucleotide
  modified_base 10: mod_base = OTHER; note = 2'-fluoro modified nucleotide
  modified_base 11: mod_base = OTHER; note = 2'-O-methyl modified nucleotide
  modified_base 12: mod_base = OTHER; note = 2'-fluoro modified nucleotide
  modified_base 13: mod_base = OTHER; note = 2'-O-methyl modified nucleotide
  modified_base 14: mod_base = OTHER; note = 2'-fluoro modified nucleotide
  modified_base 15: mod_base = OTHER; note = 2'-O-methyl modified nucleotide with phosphorothioate linkage
  modified_base 16: mod_base = OTHER; note = 2'-fluoro modified nucleotide with phosphorothioate linkage
  modified_base 17: mod_base = OTHER; note = 2'-fluoro modified nucleotide with phosphorothioate linkage
  modified_base 18: mod_base = OTHER; note = 2'-fluoro modified nucleotide with phosphorothioate linkage
  modified_base 20: mod_base = OTHER; note = 2'-fluoro modified nucleotide with phosphorothioate linkage
  modified_base 21: mod_base = OTHER; note = 2'-O-methyl modified nucleotide with phosphorothioate linkage
  modified_base 22: mod_base = OTHER; note = 2'-fluoro modified nucleotide
  modified_base 23: mod_base = OTHER; note = 2'-O-methyl modified nucleotide
  modified_base 24: mod_base = OTHER; note = 2'-fluoro modified nucleotide
  modified_base 25: mod_base = OTHER; note = 2'-O-methyl modified nucleotide
  modified_base 26: mod_base = OTHER; note = 2'-fluoro modified nucleotide
  modified_base 27: mod_base = OTHER; note = 2'-O-methyl modified nucleotide
  modified_base 28: mod_base = OTHER; note = 2'-fluoro modified nucleotide
  modified_base 29: mod_base = OTHER; note = 2'-O-methyl modified nucleotide
  modified_base 30: mod_base = OTHER; note = 2'-fluoro modified nucleotide
  modified_base 31: mod_base = OTHER; note = 2'-O-methyl modified nucleotide
  modified_base 32: mod_base = OTHER; note = 2'-O-methyl modified nucleotide with phosphorothioate linkage
  modified_base 33: mod_base = OTHER; note = 2'-O-methyl modified nucleotide with phosphorothioate linkage
  modified_base 34: mod_base = OTHER; note = 2'-O-methyl modified nucleotide with phosphorothioate linkage attached to trivalent N-acetylgalactosamine
gatagttgtaaacagttccagtcgtttcattcaa

SEQ ID NO: 2087 - RNA, 34 nt, synthetic construct
  source 1..34: mol_type = other RNA
  modified_base 1: mod_base = OTHER; note = 5' phosphate 2'-O-methyl modified nucleotide with phosphorothioate linkage
  modified_base 2: mod_base = OTHER; note = 2'-fluoro modified nucleotide with phosphorothioate linkage
  modified_base 3: mod_base = OTHER; note = 2'-O-methyl modified nucleotide
  modified_base 4: mod_base = OTHER; note = 2'-fluoro modified nucleotide
  modified_base 5: mod_base = OTHER; note = 2'-O-methyl modified nucleotide
  modified_base 6: mod_base = OTHER; note = 2'-fluoro modified nucleotide
  modified_base 7: mod_base = OTHER; note = 2'-O-methyl modified nucleotide
  modified_base 8: mod_base = OTHER; note = 2'-fluoro modified nucleotide
  modified_base 9: mod_base = OTHER; note = 2'-O-methyl modified nucleotide
  modified_base 10: mod_base = OTHER; note = 2'-fluoro modified nucleotide
  modified_base 11: mod_base = OTHER; note = 2'-O-methyl modified nucleotide
  modified_base 12: mod_base = OTHER; note = 2'-fluoro modified nucleotide
  modified_base 13: mod_base = OTHER; note = 2'-O-methyl modified nucleotide
  modified_base 14: mod_base = OTHER; note = 2'-fluoro modified nucleotide
  modified_base 15: mod_base = OTHER; note = 2'-O-methyl modified nucleotide with phosphorothioate linkage
  modified_base 16: mod_base = OTHER; note = 2'-fluoro modified nucleotide with phosphorothioate linkage
  modified_base 17: mod_base = OTHER; note = 2'-O-methyl modified nucleotide with phosphorothioate linkage
  modified_base 18: mod_base = OTHER; note = 2'-fluoro modified nucleotide with phosphorothioate linkage
  modified_base 20: mod_base = OTHER; note = 2'-fluoro modified nucleotide with phosphorothioate linkage
  modified_base 21: mod_base = OTHER; note = 2'-O-methyl modified nucleotide with phosphorothioate linkage
  modified_base 22: mod_base = OTHER; note = 2'-fluoro modified nucleotide
  modified_base 23: mod_base = OTHER; note = 2'-O-methyl modified nucleotide
  modified_base 24: mod_base = OTHER; note = 2'-fluoro modified nucleotide
  modified_base 25: mod_base = OTHER; note = 2'-O-methyl modified nucleotide
  modified_base 26: mod_base = OTHER; note = 2'-fluoro modified nucleotide
  modified_base 27: mod_base = OTHER; note = 2'-O-methyl modified nucleotide
  modified_base 28: mod_base = OTHER; note = 2'-fluoro modified nucleotide
  modified_base 29: mod_base = OTHER; note = 2'-O-methyl modified nucleotide
  modified_base 30: mod_base = OTHER; note = 2'-fluoro modified nucleotide
  modified_base 31: mod_base = OTHER; note = 2'-O-methyl modified nucleotide
  modified_base 32: mod_base = OTHER; note = 2'-O-methyl modified nucleotide with phosphorothioate linkage
  modified_base 33: mod_base = OTHER; note = 2'-O-methyl modified nucleotide with phosphorothioate linkage
  modified_base 34: mod_base = OTHER; note = 2'-O-methyl modified nucleotide with phosphorothioate linkage attached to trivalent N-acetylgalactosamine
ttacaacagaatatggtatagtcgtttcattcaa

SEQ ID NO: 2088 - RNA, 34 nt, synthetic construct
  source 1..34: mol_type = other RNA
  modified_base 1: mod_base = OTHER; note = 5' phosphate 2'-O-methyl modified nucleotide with phosphorothioate linkage
  modified_base 2: mod_base = OTHER; note = 2'-fluoro modified nucleotide with phosphorothioate linkage
  modified_base 3: mod_base = OTHER; note = 2'-O-methyl modified nucleotide
  modified_base 4: mod_base = OTHER; note = 2'-fluoro modified nucleotide
  modified_base 5: mod_base = OTHER; note = 2'-O-methyl modified nucleotide
  modified_base 6: mod_base = OTHER; note = 2'-fluoro modified nucleotide
  modified_base 7: mod_base = OTHER; note = 2'-O-methyl modified nucleotide
  modified_base 8: mod_base = OTHER; note = 2'-fluoro modified nucleotide
  modified_base 9: mod_base = OTHER; note = 2'-O-methyl modified nucleotide
  modified_base 10: mod_base = OTHER; note = 2'-fluoro modified nucleotide
  modified_base 11: mod_base = OTHER; note = 2'-O-methyl modified nucleotide
  modified_base 12: mod_base = OTHER; note = 2'-fluoro modified nucleotide
  modified_base 13: mod_base = OTHER; note = 2'-O-methyl modified nucleotide
  modified_base 14: mod_base = OTHER; note = 2'-fluoro modified nucleotide
  modified_base 15: mod_base = OTHER; note = 2'-O-methyl modified nucleotide with phosphorothioate linkage
  modified_base 16: mod_base = OTHER; note = 2'-fluoro modified nucleotide with phosphorothioate linkage
  modified_base 17: mod_base = OTHER; note = 2'-fluoro modified nucleotide with phosphorothioate linkage
  modified_base 18: mod_base = OTHER; note = 2'-fluoro modified nucleotide with phosphorothioate linkage
  modified_base 20: mod_base = OTHER; note = 2'-fluoro modified nucleotide
  modified_base 21: mod_base = OTHER; note = 2'-O-methyl modified nucleotide
  modified_base 22: mod_base = OTHER; note = 2'-fluoro modified nucleotide
  modified_base 23: mod_base = OTHER; note = 2'-O-methyl modified nucleotide
  modified_base 24: mod_base = OTHER; note = 2'-fluoro modified nucleotide
  modified_base 25: mod_base = OTHER; note = 2'-O-methyl modified nucleotide
  modified_base 26: mod_base = OTHER; note = 2'-fluoro modified nucleotide
  modified_base 27: mod_base = OTHER; note = 2'-O-methyl modified nucleotide
  modified_base 28: mod_base = OTHER; note = 2'-fluoro modified nucleotide
  modified_base 29: mod_base = OTHER; note = 2'-O-methyl modified nucleotide
  modified_base 30: mod_base = OTHER; note = 2'-fluoro modified nucleotide
  modified_base 31: mod_base = OTHER; note = 2'-O-methyl modified nucleotide
  modified_base 32: mod_base = OTHER; note = 2'-O-methyl modified nucleotide with phosphorothioate linkage
  modified_base 33: mod_base = OTHER; note = 2'-O-methyl modified nucleotide with phosphorothioate linkage
  modified_base 34: mod_base = OTHER; note = 2'-O-methyl modified nucleotide with phosphorothioate linkage attached to trivalent N-acetylgalactosamine
gatagttgtaaacagttccctgagtctgtggcaa

SEQ ID NO: 2089 - RNA, 34 nt, synthetic construct
  source 1..34: mol_type = other RNA
  modified_base 1: mod_base = OTHER; note = 5' phosphate 2'-O-methyl modified nucleotide with phosphorothioate linkage
  modified_base 2: mod_base = OTHER; note = 2'-fluoro modified nucleotide with phosphorothioate linkage
  modified_base 3: mod_base = OTHER; note = 2'-O-methyl modified nucleotide
  modified_base 4: mod_base = OTHER; note = 2'-fluoro modified nucleotide
  modified_base 5: mod_base = OTHER; note = 2'-O-methyl modified nucleotide
  modified_base 6: mod_base = OTHER; note = 2'-fluoro modified nucleotide
  modified_base 7: mod_base = OTHER; note = 2'-O-methyl modified nucleotide
  modified_base 8: mod_base = OTHER; note = 2'-fluoro modified nucleotide
  modified_base 9: mod_base = OTHER; note = 2'-O-methyl modified nucleotide
  modified_base 10: mod_base = OTHER; note = 2'-fluoro modified nucleotide
  modified_base 11: mod_base = OTHER; note = 2'-O-methyl modified nucleotide
  modified_base 12: mod_base = OTHER; note = 2'-fluoro modified nucleotide
  modified_base 13: mod_base = OTHER; note = 2'-O-methyl modified nucleotide
  modified_base 14: mod_base = OTHER; note = 2'-fluoro modified nucleotide
  modified_base 15: mod_base = OTHER; note = 2'-O-methyl modified nucleotide with phosphorothioate linkage
  modified_base 16: mod_base = OTHER; note = 2'-fluoro modified nucleotide with phosphorothioate linkage
  modified_base 17: mod_base = OTHER; note = 2'-O-methyl modified nucleotide with phosphorothioate linkage
  modified_base 18: mod_base = OTHER; note = 2'-fluoro modified nucleotide with phosphorothioate linkage
  modified_base 20: mod_base = OTHER; note = 2'-fluoro modified nucleotide
  modified_base 21: mod_base = OTHER; note = 2'-O-methyl modified nucleotide
  modified_base 22: mod_base = OTHER; note = 2'-fluoro modified nucleotide
  modified_base 23: mod_base = OTHER; note = 2'-O-methyl modified nucleotide
  modified_base 24: mod_base = OTHER; note = 2'-fluoro modified nucleotide
  modified_base 25: mod_base = OTHER; note = 2'-O-methyl modified nucleotide
  modified_base 26: mod_base = OTHER; note = 2'-fluoro modified nucleotide
  modified_base 27: mod_base = OTHER; note = 2'-O-methyl modified nucleotide
  modified_base 28: mod_base = OTHER; note = 2'-fluoro modified nucleotide
  modified_base 29: mod_base = OTHER; note = 2'-O-methyl modified nucleotide
  modified_base 30: mod_base = OTHER; note = 2'-fluoro modified nucleotide
  modified_base 31: mod_base = OTHER; note = 2'-O-methyl modified nucleotide
  modified_base 32: mod_base = OTHER; note = 2'-O-methyl modified nucleotide with phosphorothioate linkage
  modified_base 33: mod_base = OTHER; note = 2'-O-methyl modified nucleotide with phosphorothioate linkage
  modified_base 34: mod_base = OTHER; note = 2'-O-methyl modified nucleotide with phosphorothioate linkage attached to trivalent N-acetylgalactosamine
ttacaacagaatatggtatctgagtctgtggcaa

SEQ ID NO: 2090 - RNA, 19 nt, synthetic construct
  source 1..19: mol_type = other RNA
  modified_base 1: mod_base = OTHER; note = 5' phosphate 2'-O-methyl modified nucleotide with phosphorothioate linkage
  modified_base 2: mod_base = OTHER; note = 2'-fluoro modified nucleotide with phosphorothioate linkage
  modified_base 3: mod_base = OTHER; note = 2'-O-methyl modified nucleotide
  modified_base 4: mod_base = OTHER; note = 2'-fluoro modified nucleotide
  modified_base 5: mod_base = OTHER; note = 2'-O-methyl modified nucleotide
  modified_base 6: mod_base = OTHER; note = 2'-fluoro modified nucleotide
  modified_base 7: mod_base = OTHER; note = 2'-O-methyl modified nucleotide
  modified_base 8: mod_base = OTHER; note = 2'-fluoro modified nucleotide
  modified_base 9: mod_base = OTHER; note = 2'-O-methyl modified nucleotide
  modified_base 10: mod_base = OTHER; note = 2'-fluoro modified nucleotide
  modified_base 11: mod_base = OTHER; note = 2'-O-methyl modified nucleotide
  modified_base 12: mod_base = OTHER; note = 2'-fluoro modified nucleotide
  modified_base 13: mod_base = OTHER; note = 2'-O-methyl modified nucleotide
  modified_base 14: mod_base = OTHER; note = 2'-fluoro modified nucleotide
  modified_base 15: mod_base = OTHER; note = 2'-O-methyl modified nucleotide
  modified_base 16: mod_base = OTHER; note = 2'-fluoro modified nucleotide with phosphorothioate linkage
  modified_base 17: mod_base = OTHER; note = 2'-O-methyl modified nucleotide with phosphorothioate linkage
  modified_base 18: mod_base = OTHER; note = 2'-O-methyl modified nucleotide with phosphorothioate linkage
ttgccacagactcagagag

SEQ ID NO: 2091 - RNA, 34 nt, synthetic construct; identical to SEQ ID NO: 2083
  source 1..34: mol_type = other RNA
  modified_base 1: mod_base = OTHER; note = 5' phosphate 2'-O-methyl modified nucleotide with phosphorothioate linkage
  modified_base 2: mod_base = OTHER; note = 2'-fluoro modified nucleotide with phosphorothioate linkage
  modified_base 3: mod_base = OTHER; note = 2'-O-methyl modified nucleotide
  modified_base 4: mod_base = OTHER; note = 2'-fluoro modified nucleotide
  modified_base 5: mod_base = OTHER; note = 2'-O-methyl modified nucleotide
  modified_base 6: mod_base = OTHER; note = 2'-fluoro modified nucleotide
  modified_base 7: mod_base = OTHER; note = 2'-O-methyl modified nucleotide
  modified_base 8: mod_base = OTHER; note = 2'-fluoro modified nucleotide
  modified_base 9: mod_base = OTHER; note = 2'-O-methyl modified nucleotide
  modified_base 10: mod_base = OTHER; note = 2'-fluoro modified nucleotide
  modified_base 11: mod_base = OTHER; note = 2'-O-methyl modified nucleotide
  modified_base 12: mod_base = OTHER; note = 2'-fluoro modified nucleotide
  modified_base 13: mod_base = OTHER; note = 2'-O-methyl modified nucleotide
  modified_base 14: mod_base = OTHER; note = 2'-fluoro modified nucleotide
  modified_base 15: mod_base = OTHER; note = 2'-O-methyl modified nucleotide with phosphorothioate linkage
  modified_base 16: mod_base = OTHER; note = 2'-fluoro modified nucleotide with phosphorothioate linkage
  modified_base 17: mod_base = OTHER; note = 2'-O-methyl modified nucleotide with phosphorothioate linkage
  modified_base 18: mod_base = OTHER; note = 2'-fluoro modified nucleotide with phosphorothioate linkage
  modified_base 20: mod_base = OTHER; note = 2'-fluoro modified nucleotide with phosphorothioate linkage
  modified_base 21: mod_base = OTHER; note = 2'-O-methyl modified nucleotide with phosphorothioate linkage
  modified_base 22: mod_base = OTHER; note = 2'-fluoro modified nucleotide
  modified_base 23: mod_base = OTHER; note = 2'-O-methyl modified nucleotide
  modified_base 24: mod_base = OTHER; note = 2'-fluoro modified nucleotide
  modified_base 25: mod_base = OTHER; note = 2'-O-methyl modified nucleotide
  modified_base 26: mod_base = OTHER; note = 2'-fluoro modified nucleotide
  modified_base 27: mod_base = OTHER; note = 2'-O-methyl modified nucleotide
  modified_base 28: mod_base = OTHER; note = 2'-fluoro modified nucleotide
  modified_base 29: mod_base = OTHER; note = 2'-O-methyl modified nucleotide
  modified_base 30: mod_base = OTHER; note = 2'-fluoro modified nucleotide
  modified_base 31: mod_base = OTHER; note = 2'-O-methyl modified nucleotide
  modified_base 32: mod_base = OTHER; note = 2'-O-methyl modified nucleotide with phosphorothioate linkage
  modified_base 33: mod_base = OTHER; note = 2'-O-methyl modified nucleotide with phosphorothioate linkage
  modified_base 34: mod_base = OTHER; note = 2'-O-methyl modified nucleotide with phosphorothioate linkage attached to trivalent N-acetylgalactosamine

SEQ ID NO: 2092 - RNA, 34 nt, synthetic construct; identical to SEQ ID NO: 2084
  source 1..34: mol_type = other RNA
  modified_base 1: mod_base = OTHER; note = 5' phosphate 2'-O-methyl modified nucleotide with phosphorothioate linkage
  modified_base 2: mod_base = OTHER; note = 2'-fluoro modified nucleotide with phosphorothioate linkage
  modified_base 3: mod_base = OTHER; note = 2'-O-methyl modified nucleotide
  modified_base 4: mod_base = OTHER; note = 2'-fluoro modified nucleotide
  modified_base 5: mod_base = OTHER; note = 2'-O-methyl modified nucleotide
  modified_base 6: mod_base = OTHER; note = 2'-fluoro modified nucleotide
  modified_base 7: mod_base = OTHER; note = 2'-O-methyl modified nucleotide
  modified_base 8: mod_base = OTHER; note = 2'-fluoro modified nucleotide
  modified_base 9: mod_base = OTHER; note = 2'-O-methyl modified nucleotide
  modified_base 10: mod_base = OTHER; note = 2'-fluoro modified nucleotide
  modified_base 11: mod_base = OTHER; note = 2'-O-methyl modified nucleotide
  modified_base 12: mod_base = OTHER; note = 2'-fluoro modified nucleotide
  modified_base 13: mod_base = OTHER; note = 2'-O-methyl modified nucleotide
  modified_base 14: mod_base = OTHER; note = 2'-fluoro modified nucleotide
  modified_base 15: mod_base = OTHER; note = 2'-O-methyl modified nucleotide
  modified_base 16: mod_base = OTHER; note = 2'-fluoro modified nucleotide with phosphorothioate linkage
  modified_base 17: mod_base = OTHER; note = 2'-O-methyl modified nucleotide with phosphorothioate linkage
  modified_base 18: mod_base = OTHER; note = 2'-O-methyl modified nucleotide with phosphorothioate linkage
  modified_base 20: mod_base = OTHER; note = 2'-fluoro modified nucleotide with phosphorothioate linkage
  modified_base 21: mod_base = OTHER; note = 2'-O-methyl modified nucleotide with phosphorothioate linkage
  modified_base 22: mod_base = OTHER; note = 2'-fluoro modified nucleotide
  modified_base 23: mod_base = OTHER; note = 2'-O-methyl modified nucleotide
  modified_base 24: mod_base = OTHER; note = 2'-fluoro modified nucleotide
  modified_base 25: mod_base = OTHER; note = 2'-O-methyl modified nucleotide
  modified_base 26: mod_base = OTHER; note = 2'-fluoro modified nucleotide
  modified_base 27: mod_base = OTHER; note = 2'-O-methyl modified nucleotide
  modified_base 28: mod_base = OTHER; note = 2'-fluoro modified nucleotide
  modified_base 29: mod_base = OTHER; note = 2'-O-methyl modified nucleotide
  modified_base 30: mod_base = OTHER; note = 2'-fluoro modified nucleotide
  modified_base 31: mod_base = OTHER; note = 2'-O-methyl modified nucleotide
  modified_base 32: mod_base = OTHER; note = 2'-O-methyl modified nucleotide with phosphorothioate linkage
  modified_base 33: mod_base = OTHER; note = 2'-O-methyl modified nucleotide with phosphorothioate linkage
  modified_base 34: mod_base = OTHER; note = 2'-O-methyl modified nucleotide with phosphorothioate linkage attached to trivalent N-acetylgalactosamine

SEQ ID NO: 2093 - RNA, 34 nt, synthetic construct; identical to SEQ ID NO: 2085
  source 1..34: mol_type = other RNA
  modified_base 1: mod_base = OTHER; note = 5' phosphate 2'-O-methyl modified nucleotide with phosphorothioate linkage
  modified_base 2: mod_base = OTHER; note = 2'-fluoro modified nucleotide with phosphorothioate linkage
  modified_base 3: mod_base = OTHER; note = 2'-O-methyl modified nucleotide
  modified_base 4: mod_base = OTHER; note = 2'-fluoro modified nucleotide
  modified_base 5: mod_base = OTHER; note = 2'-O-methyl modified nucleotide
  modified_base 6: mod_base = OTHER; note = 2'-fluoro modified nucleotide
  modified_base 7: mod_base = OTHER; note = 2'-O-methyl modified nucleotide
  modified_base 8: mod_base = OTHER; note = 2'-fluoro modified nucleotide
  modified_base 9: mod_base = OTHER; note = 2'-O-methyl modified nucleotide
  modified_base 10: mod_base = OTHER; note = 2'-fluoro modified nucleotide
  modified_base 11: mod_base = OTHER; note = 2'-O-methyl modified nucleotide
  modified_base 12: mod_base = OTHER; note = 2'-fluoro modified nucleotide
  modified_base 13: mod_base = OTHER; note = 2'-O-methyl modified nucleotide
  modified_base 14: mod_base = OTHER; note = 2'-fluoro modified nucleotide
  modified_base 15: mod_base = OTHER; note = 2'-O-methyl modified nucleotide
  modified_base 16: mod_base = OTHER; note = 2'-fluoro modified nucleotide with phosphorothioate linkage
  modified_base 17: mod_base = OTHER; note = 2'-O-methyl modified nucleotide with phosphorothioate linkage
  modified_base 18: mod_base = OTHER; note = 2'-O-methyl modified nucleotide with phosphorothioate linkage
  modified_base 20: mod_base = OTHER; note = 2'-fluoro modified nucleotide with phosphorothioate linkage
  modified_base 21: mod_base = OTHER; note = 2'-O-methyl modified nucleotide with phosphorothioate linkage
  modified_base 22: mod_base = OTHER; note = 2'-fluoro modified nucleotide
  modified_base 23: mod_base = OTHER; note = 2'-O-methyl modified nucleotide
  modified_base 24: mod_base = OTHER; note = 2'-fluoro modified nucleotide
  modified_base 25: mod_base = OTHER; note = 2'-O-methyl modified nucleotide
  modified_base 26: mod_base = OTHER; note = 2'-fluoro modified nucleotide
  modified_base 27: mod_base = OTHER; note = 2'-O-methyl modified nucleotide
  modified_base 28: mod_base = OTHER; note = 2'-fluoro modified nucleotide
  modified_base 29: mod_base = OTHER; note = 2'-O-methyl modified nucleotide
  modified_base 30: mod_base = OTHER; note = 2'-fluoro modified nucleotide
  modified_base 31: mod_base = OTHER; note = 2'-O-methyl modified nucleotide
  modified_base 32: mod_base = OTHER; note = 2'-O-methyl modified nucleotide with phosphorothioate linkage
  modified_base 33: mod_base = OTHER; note = 2'-O-methyl modified nucleotide with phosphorothioate linkage
  modified_base 34: mod_base = OTHER; note = 2'-O-methyl modified nucleotide with phosphorothioate linkage attached to trivalent N-acetylgalactosamine

SEQ ID NO: 2094 - RNA, 34 nt, synthetic construct; identical to SEQ ID NO: 2086
  source 1..34: mol_type = other RNA
  modified_base 1: mod_base = OTHER; note = 5' phosphate 2'-O-methyl modified nucleotide with phosphorothioate linkage
  modified_base 2: mod_base = OTHER; note = 2'-fluoro modified nucleotide with phosphorothioate linkage
  modified_base 3: mod_base = OTHER; note = 2'-O-methyl modified nucleotide
  modified_base 4: mod_base = OTHER; note = 2'-fluoro modified nucleotide
  modified_base 5: mod_base = OTHER; note = 2'-O-methyl modified nucleotide
  modified_base 6: mod_base = OTHER; note = 2'-fluoro modified nucleotide
  modified_base 7: mod_base = OTHER; note = 2'-O-methyl modified nucleotide
  modified_base 8: mod_base = OTHER; note = 2'-fluoro modified nucleotide
  modified_base 9: mod_base = OTHER; note = 2'-O-methyl modified nucleotide
  modified_base 10: mod_base = OTHER; note = 2'-fluoro modified nucleotide
  modified_base 11: mod_base = OTHER; note = 2'-O-methyl modified nucleotide
  modified_base 12: mod_base = OTHER; note = 2'-fluoro modified nucleotide
  modified_base 13: mod_base = OTHER; note = 2'-O-methyl modified nucleotide
  modified_base 14: mod_base = OTHER; note = 2'-fluoro modified nucleotide
  modified_base 15: mod_base = OTHER; note = 2'-O-methyl modified nucleotide with phosphorothioate linkage
  modified_base 16: mod_base = OTHER; note = 2'-fluoro modified nucleotide with phosphorothioate linkage
  modified_base 17: mod_base = OTHER; note = 2'-fluoro modified nucleotide with phosphorothioate linkage
  modified_base 18: mod_base = OTHER; note = 2'-fluoro modified nucleotide with phosphorothioate linkage
  modified_base 20: mod_base = OTHER; note = 2'-fluoro modified nucleotide with phosphorothioate linkage
  modified_base 21: mod_base = OTHER; note = 2'-O-methyl modified nucleotide with phosphorothioate linkage
  modified_base 22: mod_base = OTHER; note = 2'-fluoro modified nucleotide
  modified_base 23: mod_base = OTHER; note = 2'-O-methyl modified nucleotide
  modified_base 24: mod_base = OTHER; note = 2'-fluoro modified nucleotide
  modified_base 25: mod_base = OTHER; note = 2'-O-methyl modified nucleotide
  modified_base 26: mod_base = OTHER; note = 2'-fluoro modified nucleotide
  modified_base 27: mod_base = OTHER; note = 2'-O-methyl modified nucleotide
  modified_base 28: mod_base = OTHER; note = 2'-fluoro modified nucleotide
  modified_base 29: mod_base = OTHER; note = 2'-O-methyl modified nucleotide
  modified_base 30: mod_base = OTHER; note = 2'-fluoro modified nucleotide
  modified_base 31: mod_base = OTHER; note = 2'-O-methyl modified nucleotide
  modified_base 32: mod_base = OTHER; note = 2'-O-methyl modified nucleotide with phosphorothioate linkage
  modified_base 33: mod_base = OTHER; note = 2'-O-methyl modified nucleotide with phosphorothioate linkage
  modified_base 34: mod_base = OTHER; note = 2'-O-methyl modified nucleotide with phosphorothioate linkage attached to trivalent N-acetylgalactosamine

SEQ ID NO: 2095 - RNA, 34 nt, synthetic construct; identical to SEQ ID NO: 2087
  source 1..34: mol_type = other RNA
  modified_base 1: mod_base = OTHER; note = 5' phosphate 2'-O-methyl modified nucleotide with phosphorothioate linkage
  modified_base 2: mod_base = OTHER; note = 2'-fluoro modified nucleotide with phosphorothioate linkage
  modified_base 3: mod_base = OTHER; note = 2'-O-methyl modified nucleotide
  modified_base 4: mod_base = OTHER; note = 2'-fluoro modified nucleotide
  modified_base 5: mod_base = OTHER; note = 2'-O-methyl modified nucleotide
  modified_base 6: mod_base = OTHER; note = 2'-fluoro modified nucleotide
  modified_base 7: mod_base = OTHER; note = 2'-O-methyl modified nucleotide
  modified_base 8: mod_base = OTHER; note = 2'-fluoro modified nucleotide
  modified_base 9: mod_base = OTHER; note = 2'-O-methyl modified nucleotide
  modified_base 10: mod_base = OTHER; note = 2'-fluoro modified nucleotide
  modified_base 11: mod_base = OTHER; note = 2'-O-methyl modified nucleotide
  modified_base 12: mod_base = OTHER; note = 2'-fluoro modified nucleotide
  modified_base 13: mod_base = OTHER; note = 2'-O-methyl modified nucleotide
  modified_base 14: mod_base = OTHER; note = 2'-fluoro modified nucleotide
  modified_base 15: mod_base = OTHER; note = 2'-O-methyl modified nucleotide with phosphorothioate linkage
  modified_base 16: mod_base = OTHER; note = 2'-fluoro modified nucleotide with phosphorothioate linkage
  modified_base 17: mod_base = OTHER; note = 2'-O-methyl modified nucleotide with phosphorothioate linkage
  modified_base 18: mod_base = OTHER; note = 2'-fluoro modified nucleotide with phosphorothioate linkage
  modified_base 20: mod_base = OTHER; note = 2'-fluoro modified nucleotide with phosphorothioate linkage
  modified_base 21: mod_base = OTHER; note = 2'-O-methyl modified nucleotide with phosphorothioate linkage
  modified_base 22: mod_base = OTHER; note = 2'-fluoro modified nucleotide
  modified_base 23: mod_base = OTHER; note = 2'-O-methyl modified nucleotide
  modified_base 24: mod_base = OTHER; note = 2'-fluoro modified nucleotide
  modified_base 25: mod_base = OTHER; note = 2'-O-methyl modified nucleotide
  modified_base 26: mod_base = OTHER; note = 2'-fluoro modified nucleotide
  modified_base 27: mod_base = OTHER; note = 2'-O-methyl modified nucleotide
  modified_base 28: mod_base = OTHER; note = 2'-fluoro modified nucleotide
  modified_base 29: mod_base = OTHER; note = 2'-O-methyl modified nucleotide
  modified_base 30: mod_base = OTHER; note = 2'-fluoro modified nucleotide
  modified_base 31: mod_base = OTHER; note = 2'-O-methyl modified nucleotide
  modified_base 32: mod_base = OTHER; note = 2'-O-methyl modified nucleotide with phosphorothioate linkage
  modified_base 33: mod_base = OTHER; note = 2'-O-methyl modified nucleotide with phosphorothioate linkage
  modified_base 34: mod_base = OTHER; note = 2'-O-methyl modified nucleotide with phosphorothioate linkage attached to trivalent N-acetylgalactosamine

SEQ ID NO: 2096 - RNA, 34 nt, synthetic construct; identical to SEQ ID NO: 2088
  source 1..34: mol_type = other RNA
  modified_base 1: mod_base = OTHER; note = 5' phosphate 2'-O-methyl modified nucleotide with phosphorothioate linkage
  modified_base 2: mod_base = OTHER; note = 2'-fluoro modified nucleotide with phosphorothioate linkage
  modified_base 3: mod_base = OTHER; note = 2'-O-methyl modified nucleotide
  modified_base 4: mod_base = OTHER; note = 2'-fluoro modified nucleotide
  modified_base 5: mod_base = OTHER; note = 2'-O-methyl modified nucleotide
  modified_base 6: mod_base = OTHER; note = 2'-fluoro modified nucleotide
  modified_base 7: mod_base = OTHER; note = 2'-O-methyl modified nucleotide
  modified_base 8: mod_base = OTHER; note = 2'-fluoro modified nucleotide
  modified_base 9: mod_base = OTHER; note = 2'-O-methyl modified nucleotide
  modified_base 10: mod_base = OTHER; note = 2'-fluoro modified nucleotide
  modified_base 11: mod_base = OTHER; note = 2'-O-methyl modified nucleotide
  modified_base 12: mod_base = OTHER; note = 2'-fluoro modified nucleotide
  modified_base 13: mod_base = OTHER; note = 2'-O-methyl modified nucleotide
  modified_base 14: mod_base = OTHER; note = 2'-fluoro modified nucleotide
  modified_base 15: mod_base = OTHER; note = 2'-O-methyl modified nucleotide with phosphorothioate linkage
  modified_base 16: mod_base = OTHER; note = 2'-fluoro modified nucleotide with phosphorothioate linkage
  modified_base 17: mod_base = OTHER; note = 2'-fluoro modified nucleotide with phosphorothioate linkage
  modified_base 18: mod_base = OTHER; note = 2'-fluoro modified nucleotide with phosphorothioate linkage
  modified_base 20: mod_base = OTHER; note = 2'-fluoro modified nucleotide
  modified_base 21: mod_base = OTHER; note = 2'-O-methyl modified nucleotide
  modified_base 22: mod_base = OTHER; note = 2'-fluoro modified nucleotide
  modified_base 23: mod_base = OTHER; note = 2'-O-methyl modified nucleotide
  modified_base 24: mod_base = OTHER; note = 2'-fluoro modified nucleotide
  modified_base 25: mod_base = OTHER; note = 2'-O-methyl modified nucleotide
  modified_base 26: mod_base = OTHER; note = 2'-fluoro modified nucleotide
  modified_base 27: mod_base = OTHER; note = 2'-O-methyl modified nucleotide
  modified_base 28: mod_base = OTHER; note = 2'-fluoro modified nucleotide
  modified_base 29: mod_base = OTHER; note = 2'-O-methyl modified nucleotide
  modified_base 30: mod_base = OTHER; note = 2'-fluoro modified nucleotide
  modified_base 31: mod_base = OTHER; note = 2'-O-methyl modified nucleotide
  modified_base 32: mod_base = OTHER; note = 2'-O-methyl modified nucleotide with phosphorothioate linkage
  modified_base 33: mod_base = OTHER; note = 2'-O-methyl modified nucleotide with phosphorothioate linkage
  modified_base 34: mod_base = OTHER; note = 2'-O-methyl modified nucleotide with phosphorothioate linkage attached to trivalent N-acetylgalactosamine

SEQ ID NO: 2097 - RNA, 34 nt, synthetic construct; identical to SEQ ID NO: 2089
  source 1..34: mol_type = other RNA
  modified_base 1: mod_base = OTHER; note = 5' phosphate 2'-O-methyl modified nucleotide with phosphorothioate linkage
  modified_base 2: mod_base = OTHER; note = 2'-fluoro modified nucleotide with phosphorothioate linkage
  modified_base 3: mod_base = OTHER; note = 2'-O-methyl modified nucleotide
  modified_base 4: mod_base = OTHER; note = 2'-fluoro modified nucleotide
  modified_base 5: mod_base = OTHER; note = 2'-O-methyl modified nucleotide
  modified_base 6: mod_base = OTHER; note = 2'-fluoro modified nucleotide
  modified_base 7: mod_base = OTHER; note = 2'-O-methyl modified nucleotide
  modified_base 8: mod_base = OTHER; note = 2'-fluoro modified nucleotide
  modified_base 9: mod_base = OTHER; note = 2'-O-methyl modified nucleotide
  modified_base 10: mod_base = OTHER; note = 2'-fluoro modified nucleotide
  modified_base 11: mod_base = OTHER; note = 2'-O-methyl modified nucleotide
  modified_base 12: mod_base = OTHER; note = 2'-fluoro modified nucleotide
  modified_base 13: mod_base = OTHER; note = 2'-O-methyl modified nucleotide
  modified_base 14: mod_base = OTHER; note = 2'-fluoro modified nucleotide
  modified_base 15: mod_base = OTHER; note = 2'-O-methyl modified nucleotide with phosphorothioate linkage
  modified_base 16: mod_base = OTHER; note = 2'-fluoro modified nucleotide with phosphorothioate linkage
  modified_base 17: mod_base = OTHER; note = 2'-O-methyl modified nucleotide with phosphorothioate linkage
  modified_base 18: mod_base = OTHER; note = 2'-fluoro modified nucleotide with phosphorothioate linkage
  modified_base 20: mod_base = OTHER; note = 2'-fluoro modified nucleotide
  modified_base 21: mod_base = OTHER; note = 2'-O-methyl modified nucleotide
  modified_base 22: mod_base = OTHER; note = 2'-fluoro modified nucleotide
  modified_base 23: mod_base = OTHER; note = 2'-O-methyl modified nucleotide
  modified_base 24: mod_base = OTHER; note = 2'-fluoro modified nucleotide
  modified_base 25: mod_base = OTHER; note = 2'-O-methyl modified nucleotide
  modified_base 26: mod_base = OTHER; note = 2'-fluoro modified nucleotide
  modified_base 27: mod_base = OTHER; note = 2'-O-methyl modified nucleotide
  modified_base 28: mod_base = OTHER; note = 2'-fluoro modified nucleotide
  modified_base 29: mod_base = OTHER; note = 2'-O-methyl modified nucleotide
  modified_base 30: mod_base = OTHER; note = 2'-fluoro modified nucleotide
  modified_base 31: mod_base = OTHER; note = 2'-O-methyl modified nucleotide
  modified_base 32: mod_base = OTHER; note = 2'-O-methyl modified nucleotide with phosphorothioate linkage
  modified_base 33: mod_base = OTHER; note = 2'-O-methyl modified nucleotide with phosphorothioate linkage
  modified_base 34: mod_base = OTHER; note = 2'-O-methyl modified nucleotide with phosphorothioate linkage attached to trivalent N-acetylgalactosamine

SEQ ID NO: 2098 - RNA, 34 nt, synthetic construct; identical to SEQ ID NO: 2082
  source 1..34: mol_type = other RNA
  modified_base 1: mod_base = OTHER; note = 5' phosphate 2'-O-methyl modified nucleotide with phosphorothioate linkage
  modified_base 2: mod_base = OTHER; note = 2'-fluoro modified nucleotide with phosphorothioate linkage
  modified_base 3: mod_base = OTHER; note = 2'-O-methyl modified nucleotide
  modified_base 4: mod_base = OTHER; note = 2'-fluoro modified nucleotide
  modified_base 5: mod_base = OTHER; note = 2'-O-methyl modified nucleotide
  modified_base 6: mod_base = OTHER; note = 2'-fluoro modified nucleotide
  modified_base 7: mod_base = OTHER; note = 2'-O-methyl modified nucleotide
  modified_base 8: mod_base = OTHER; note = 2'-fluoro modified nucleotide
  modified_base 9: mod_base = OTHER; note = 2'-O-methyl modified nucleotide
  modified_base 10: mod_base = OTHER; note = 2'-fluoro modified nucleotide
  modified_base 11: mod_base = OTHER; note = 2'-O-methyl modified nucleotide
  modified_base 12: mod_base = OTHER; note = 2'-fluoro modified nucleotide
  modified_base 13: mod_base = OTHER; note = 2'-O-methyl modified nucleotide
  modified_base 14: mod_base = OTHER; note = 2'-fluoro modified nucleotide
  modified_base 15: mod_base = OTHER; note = 2'-O-methyl modified nucleotide with phosphorothioate linkage
  modified_base 16: mod_base = OTHER; note = 2'-fluoro modified nucleotide with phosphorothioate linkage
  modified_base 17: mod_base = OTHER; note = 2'-O-methyl modified nucleotide with phosphorothioate linkage
  modified_base 18: mod_base = OTHER; note = 2'-fluoro modified nucleotide with phosphorothioate linkage
  modified_base 20: mod_base = OTHER; note = 2'-fluoro modified nucleotide with phosphorothioate linkage
  modified_base 21: mod_base = OTHER; note = 2'-O-methyl modified nucleotide with phosphorothioate linkage
  modified_base 22: mod_base = OTHER; note = 2'-fluoro modified nucleotide
  modified_base 23: mod_base = OTHER; note = 2'-O-methyl modified nucleotide
  modified_base 24: mod_base = OTHER; note = 2'-fluoro modified nucleotide
  modified_base 25: mod_base = OTHER; note = 2'-O-methyl modified nucleotide
  modified_base 26: mod_base = OTHER; note = 2'-fluoro modified nucleotide
  modified_base 27: mod_base = OTHER; note = 2'-O-methyl modified nucleotide
  modified_base 28: mod_base = OTHER; note = 2'-fluoro modified nucleotide
  modified_base 29: mod_base = OTHER; note = 2'-O-methyl modified nucleotide
  modified_base 30: mod_base = OTHER; note = 2'-fluoro modified nucleotide
  modified_base 31: mod_base = OTHER; note = 2'-O-methyl modified nucleotide
  modified_base 32: mod_base = OTHER; note = 2'-O-methyl modified nucleotide with phosphorothioate linkage
  modified_base 33: mod_base = OTHER; note = 2'-O-methyl modified nucleotide with phosphorothioate linkage
  modified_base 34: mod_base = OTHER; note = 2'-O-methyl modified nucleotide with phosphorothioate linkage attached to trivalent N-acetylgalactosamine

1. A nucleic acid construct comprising at least:
(a) a first nucleic acid sequence that is complementary to a first portion of an RNA which is transcribed from a targeted CFB gene;
(b) a second nucleic acid sequence that is complementary to a second portion of an RNA which is transcribed from a targeted C5 gene;
(c) a third nucleic acid sequence that is at least partially complementary to said first nucleic acid portion of (a), so as to form a first nucleic acid duplex region therewith;
(d) a fourth nucleic acid sequence that is at least partially complementary to said second nucleic acid portion of (b), so as to form a second nucleic acid duplex region therewith,
wherein the first nucleic acid sequence of (a) is directly linked to the fourth nucleic acid sequence of (d) and the second nucleic acid of (b) is directly linked to the third nucleic acid sequence of (c);
wherein the construct contains labile sites such that subsequent to in vivo administration the construct is cleaved at said labile sites to yield at least first and second discrete nucleic acid targeting molecules that respectively target the RNA portions transcribed from the targeted genes of (a) and (b);
wherein the
wherein (i) the first nucleic acid targeting molecule modulates expression of the target gene of (a), and comprises, or is derived from, the first nucleic acid portion of (a), and (ii) the second nucleic acid targeting molecule modulates expression of the targeted gene of (b), and comprises, or is derived from, the second nucleic acid portion of (b).

2-4. (canceled)

5. The construct according to claim 1, wherein said labile sites comprise one or more unmodified nucleotides.

6-8. (canceled)

9. The construct according to claim 1, wherein
(a) said first nucleic acid sequence is selected from the group consisting of SEQ ID Nos. 1-252;
(b) said second nucleic acid sequence is selected from the group consisting of SEQ ID Nos. 504-754;
(c) said third nucleic acid sequence is selected from the group consisting of SEQ ID Nos 253-504; and/or
(d) said fourth nucleic acid sequence is selected from the group consisting of SEQ ID Nos. 755-1004,
wherein said third and fourth nucleobase sequences, to the extent they have a length of 15 nucleobases, may be shorter by one, two, three or four nucleobases, and to the extent they have a length of 14 nucleobases, by one, two or three nucleobases, wherein advantageously the 5′-terminal nucleobase(s) is/are absent.

10-12. (canceled)

13. The construct according to claim 1, wherein said second and third nucleic acid sequences have are selected from the group consisting of: SEQ ID NOs: 534 and 265; 534 and 358; 541 and 265; 541 and 358; and wherein said sequences of SEQ ID NOs: 265 and 358: may be shorter by one, two, three or four nucleobases, wherein optionally the 5′-terminal nucleobase(s) is/are absent.

14-21. (canceled)

22. The construct according to claim, wherein said first and second nucleic acid sequences each independently have a length of 18 to 21, 18 to 20, or 19 nucleotides.

23-27. (canceled)

28. The construct according to claim 1, which further comprises one or more ligands.

29-36. (canceled)

37. The construct according to claim 1, which comprises one, two, or three N-Acetyl-Galactosamine moieties.

38-39. (canceled)

40. The construct according to claim 37, wherein said ligand has the following structure:

[chemical structure]

41. (canceled)

42. The construct according to claim 1, which comprises 1 to 15 phosphorothioate or phosphorodithioate internucleotide linkages.

43-46. (canceled)

47. The construct according to claim 1, wherein at least one nucleotide is 2′ modified.

48-61. (canceled)

62. The construct according to claim 47, wherein said 2′ modified sugar is a 2-O-methyl modified sugar of a 2′-F modified sugar.

63-69. (canceled)

70. The construct according to claim 5, wherein all remaining nucleotides other than the labile sites contain either 2′-O-methyl modifications or 2′-F modifications in ribose moieties.

71-72. (canceled)

73. The construct of claim 1, wherein
(a) said first nucleic acid portion has a sequence selected from the first 19 nucleotides of an oligonucleotide selected from the group consisting of SEQ ID Nos. 1505-1758, or is represented by a nucleic acid sequence: 5′[phos] mU #fU #mG fA mA fU mG fA mA fA mC fG mA fC mU #fU #mC #fU #rC (SEQ ID No. 2075); or
5′[phos] mU #fU #mG fC mC fA mC fA mG fA mC fU mC fA mG fA #mG #mA #rG (SEQ ID No. 2076);
(b) said second nucleic acid portion is selected from the group consisting of SEQ ID Nos. 1759-1858, or is represented by a nucleic acid sequence 5′[phos] mG #fA #mU fA mG fU mU fG mU fA mA fA mC fA mG #fU #fU #fC #rC (SEQ ID No. 2077); or
5′[phos] mU #fU #mA fC mA fA mC fA mG fA mA fU mA fU mG #fG #mU #fA #rU (SEQ ID No. 2078);
(c) said fourth nucleic acid portion is selected from the group consisting of SEQ ID Nos.1859-1958, or is represented by a nucleic acid sequence: fC #mU #fG mU fU mU fA mC fA mA fC mU mA #mU #mC #[3XGalNAc](SEQ ID No. 2079); or
fC #mA #fU mA fU mU fC mU fG mU fU mG mU #mA #mA #[3XGalNAC](SEQ ID No. 2090); and/or
(d) said third nucleic acid portion is selected from the group consisting of (i) the last 15 nucleotides of each of SEQ ID Nos. 1505-1756, (ii) a last 14 nucleotides of SEQ ID No. 1757, and (iii) a last 11 nucleotides of SEQ ID No. 1758, or is represented by a nucleic acid sequence: fC mU fG mA fG mU fC mU fG mU fG mG mC #mA #mA #[3XGalNAc](SEQ ID No. 2080); or
fC mU fG mA fG mU fC mU fG mU fG mG mC #mA #mA #(SEQ ID No. 2081).

74. The construct of claim 1 wherein said construct comprises a first strand selected from the group consisting of SEQ ID Nos. 2059-2066, and a second strand selected from the group consisting of SEQ ID Nos. 2067-2074.

75. The construct of claim 74, wherein the first strand has a sequence:
(SEQ ID No. 2082)
5′[phos] mU# fU# mG fA mA fU mG fA mA fA mC
fG mA fC mU# fU# mC# fU# rC fC# mU# fG mU
fU mU fA mC fA mA fC mU mA# mU# mC#
[3XGalNAC];
(SEQ ID No. 2083)
5′[phos] mU# fU# mG fA mA fU mG fA mA fA mC
fG mA fC mU# fU# mC# fU# rC fC# mA# fU mA
fU mU fC mU fG mU fU mG mU# mA# mA#
[3XGalNAc];
(SEQ ID No. 2084)
5′[phos] mU# fU# mG fC mC fA mC fA mG fA mC
fU mC fA mG fA# mG# mA# rG fC# mU# fG mU
fU mU fA mC fA mA fC mU mA# mU# mC#
[3XGalNAc];
or
(SEQ ID No. 2085)
5′[phos] mU# fU# mG fC mC fA mC fA mG fA mC
fU mC fA mG fA# mG# mA# rG fC# mA# fU mA
fU mU fC mU fG mU fU mG mU# mA# mA#
[3XGalNAc];
and/or wherein the second strand has a sequence:
(SEQ ID No. 2086)
5′[phos] mG# fA# mU fA mG fU mU fG mU fA mA
fA mC fA mG# fU# fU# fC# rC fA# mG# fU mC
fG mU fU mU fC mA fU mU mC# mA# mA#
[3XGalNAc];
(SEQ ID No. 2087)
5′[phos] mU# fU# mA fC mA fA mC fA mG fA mA
fU mA fU mG# fG# mU# fA# rU fA# mG# fU mC
fG mU fU mU fC mA fU mU mC# mA# mA#
[3XGalNAc];
(SEQ ID No. 2088)
5′[phos] mG# fA# mU fA mG fU mU fG mU fA mA
fA mC fA mG# fU# fU# fC# rC fC mU fG mA
fG mU fC mU fG mU fG mG mC# mA# mA#
[3XGalNAc];
or
(SEQ ID No. 2089)
5′[phos] mU# fU# mA fC mA fA mC fA mG fA mA
fU mA fU mG# fG# mU# fA# rU fC mU fG mA
fG mU fC mU fG mU fG mG mC# mA# mA#
[3XGalNAc],
wherein Phos being phosphate; [mN], N being any nucleoside, designates 2′-OMe; [fN], N being any nucleoside, designates: 2′-F; [rA], N being any nucleoside, designates: 2′-OH; [#] designates a phosphorothioate connecting two adjacent nucleosides; and [3XGalNAc] designates a following ligand, as shown in square brackets: [chemical structure]
and wherein 5Phos is optional.

76. The construct according to claim 1, selected from the group consisting of SEQ ID Nos. 2059-2074.

77. The construct according to claim 1, wherein the 3′ terminal positions of said first and said third nucleic acid sequences are replaced with an unmodified nucleotide.

78-83. (canceled)

84. The construct according to claim 1, wherein the total length of the construct is 30 to 35 nucleosides, optionally 33 or 34 nucleosides.

85. (canceled)

86. A pharmaceutical composition comprising a nucleic acid construct according to claim 1 and a pharmaceutically acceptable excipient, diluent, antioxidant, and/or preservative.

87-88. (canceled)

89. The pharmaceutical composition of claim 86, wherein said pharmaceutical composition furthermore comprises one or more further pharmaceutically active agents selected from the group consisting of: an agent which modulates the innate and/or the adaptive immune system; an oligomeric compound directed to an immune system target; compounds targeting the proximal complement or Lectin pathway; MASP-2 targeting compounds; C3-targeting compounds; Sutimlimab; Narsoplimab; Pegcetacoplan AMY-102; IONIS-FB-LRx-LPN023; Lapalizumab; Mini-FH/AMY-201 MicroCept; GLG561; and combinations thereof.

90-95. (canceled)

96. A method of treating a disease or disorder comprising administration of a nucleic acid construct according to claim 1 to an individual in need of treatment of a disease or disorder requiring reduction of CFB and/or C5 expression.

94-99. (canceled)
